(19) United States
(12) Patent Application Publication
(10) Pub. No.: US 2024/0279688 A1
(43) Pub. Date: Aug. 22, 2024

(54) ENGINEERED MICROORGANISM FOR IMPROVED ETHANOL FERMENTATION

(71) Applicant: Novozymes A/S, Bagsvaerd (DK)

(72) Inventors: Hamid Rismani YAZDI, Raleigh, NC (US); Eric Allain, Wake Forest, NC (US); Michael Glenn Catlett, West Sacramento, CA (US); Christie Lynn Strahler, Knightdale, NC (US)

(73) Assignee: Novozymes A/S, Bagsvaerd (DK)

(21) Appl. No.: 18/568,235

(22) PCT Filed: Jun. 6, 2022
(86) PCT No.: PCT/US2022/032354

§ 371 Date: Dec. 7, 2023

Related U.S. Application Data
(60) Provisional application No. 63/197,788, filed on Jun. 7, 2021.

(51) Int. Cl. C12P 7/06; C07K 14/37; C12N 1/14; C12N 9/02; C12N 9/30; C12N 9/34

(52) U.S. Cl. CPC C12P 7/06; C07K 14/37; C12N 1/145; C12N 9/0008; C12N 9/242; C12N 9/2428; C12Y 102/01009; C12Y 302/01001; C12Y 302/01003

(57) ABSTRACT

Described herein are recombinant host organisms expressing a glucose or glycerol transporter, and optionally further expressing a non-phosphorylating NADP-dependent glyceraldehyde-3-phosphate dehydrogenase (GAPN). Also described are processes for producing a fermentation product, such as ethanol, from starch or cellulosic-containing material with the recombinant host organisms.

### REFERENCE TO A SEQUENCE LISTING

[0001] This application contains a Sequence Listing in computer readable form, which is incorporated herein by reference.

### BACKGROUND

[0002] Production of ethanol from starch and cellulosic containing materials is well-known in the art.

[0003] The most commonly industrially used commercial process for starch-containing material, often referred to as a “conventional process”, includes liquefying gelatinized starch at high temperature (about 85° C.) using typically a bacterial alpha-amylase, followed by simultaneous saccharification and fermentation (SSF) carried out anaerobically in the presence of typically a glucoamylase and a Saccharomyces cerevisiae yeast.

[0004] Yeasts which are used for production of ethanol for use as fuel, such as in the corn ethanol industry, require several characteristics to ensure cost effective production of the ethanol. These characteristics include ethanol tolerance, low by-product yield, rapid fermentation, and the ability to limit the amount of residual sugars remaining in the ferment. Such characteristics have a marked effect on the viability of the industrial process.

[0005] Yeast of the genus Saccharomyces exhibits many of the characteristics required for production of ethanol. In particular, strains of Saccharomyces cerevisiae are widely used for the production of ethanol in the fuel ethanol industry. Strains of Saccharomyces cerevisiae that are widely used in the fuel ethanol industry have the ability to produce high yields of ethanol under fermentation conditions found in, for example, the fermentation of corn mash. An example of such a strain is the yeast used in commercially available ethanol yeast product called ETHANOL RED®.

[0006] Saccharomyces cerevisae yeast have been genetically engineered to express alpha-amylase and/or glucoamylase to improve yield and decrease the amount of exogenously added enzymes necessary during SSF (e.g., WO2018/098381, WO2017/087330, WO2017/037614, WO2011/128712, WO2011/153516, US2018/0155744). Yeast have also been engineered to express trehalase in an attempt to increase fermentation yield by breaking down residual trehalose (e.g., WO2017/077504).

[0007] Attempts to reduce major undesirable byproducts of fermentation, including glycerol, have been described in e.g., WO2009/056984, WO2015/028583, WO2018/114758, WO2018/114762, WO2018/176021, WO2018/215956, and WO2019/191263.

[0008] Despite significant improvement of ethanol production processes over the past decade there is still a desire and need for providing improved processes of ethanol fermentation from starch and cellulosic containing material with reduced levels of glycerol byproducts in an economically and commercially relevant scale.

### SUMMARY

[0009] Described herein are, inter alia, methods for producing a fermentation product, such as ethanol, from starch or cellulosic-containing material, and microorganisms suitable for use in such processes. The Applicant has discovered unexpectedly that yeast expressing a glycerol transporter together with a non-phosphorylating NADP-dependent glyceraldehyde-3-phosphate dehydrogenase (GAPN) produce significantly less glycerol. The Applicant has further found that yeast expressing certain glycerol or glucose transporters show remarkably improved ethanol production, decreased glycerol production, decreased succinic acid production and/or decreased acetic acid production. The Applicant also surprisingly found that sodium-coupled glucose transporters (e.g., SEQ ID NOs: 358 and 363) which are not expected to generate an ATP drain provided exceptional fermentation performance.

[0010] A first aspect relates to a recombinant host cell comprising a heterologous polynucleotide encoding a glycerol transporter, and a heterologous polynucleotide encoding a non-phosphorylating NADP-dependent glyceraldehyde-3-phosphate dehydrogenase (GAPN).

[0011] In one embodiment of the first aspect, the cell is capable of reduced glycerol production compared to the same cell without the heterologous polynucleotide encoding the non-phosphorylating NADP-dependent glyceraldehyde-3-phosphate dehydrogenase (GAPN) under the same conditions (e.g., after 40 hours of fermentation). In one embodiment, the cell is capable of reduced glycerol production compared to the same cell without the heterologous polynucleotide encoding the glycerol transporter under the same conditions (e.g., after 40 hours of fermentation).

[0012] In one embodiment of the first aspect, the heterologous polynucleotide encoding the non-phosphorylating NADP-dependent glyceraldehyde-3-phosphate dehydrogenase (GAPN) is operably linked to a promoter that is foreign to the polynucleotide. In one embodiment, the non-phosphorylating NADP-dependent glyceraldehyde-3-phosphate dehydrogenase (GAPN) has a mature polypeptide sequence with at least 60%, e.g., at least 65%, 70%, 75%, 80%, 85%, 90%, 95%, 97%, 98%, 99%, or 100% sequence identity to any one of SEQ ID NOs: 262-280 and 365-391. In one embodiment, the non-phosphorylating NADP-dependent glyceraldehyde-3-phosphate dehydrogenase (GAPN) has a mature polypeptide sequence that differs by no more than ten amino acids, e.g., by no more than five amino acids, by no more than four amino acids, by no more than three amino acids, by no more than two amino acids, or by one amino acid from any one of SEQ ID NOs: 262-280 and 365-391. In one embodiment, the non-phosphorylating NADP-dependent glyceraldehyde-3-phosphate dehydrogenase (GAPN) has a mature polypeptide sequence comprising or consisting of the amino acid sequence of any one SEQ ID NOs: 262-280 and 365-391.

[0013] In one embodiment of the first aspect, the heterologous polynucleotide encoding the glycerol transporter is operably linked to a promoter that is foreign to the polynucleotide. In one embodiment, the glycerol transporter has a mature polypeptide sequence with at least 60%, e.g., at least 65%, 70%, 75%, 80%, 85%, 90%, 95%, 97%, 98%, 99%, or 100% sequence identity to any one of SEQ ID NOs: 312-323 (e.g., SEQ ID NO: 312, 313, 315, 317, 318, 319, 320 or 323).

[0014] In one embodiment, the glycerol transporter has a mature polypeptide sequence that differs by no more than ten amino acids, e.g., by no more than five amino acids, by no more than four amino acids, by no more than three amino acids, by no more than two amino acids, or by one amino acid from any one of SEQ ID NOs: 312-323 (e.g., SEQ ID NO: 312, 313, 315, 317, 318, 319, 320 or 323). In one embodiment, the glycerol transporter has a mature polypeptide sequence comprising or consisting of the amino acid sequence of any one of SEQ ID NOs: 312-323 (e.g., SEQ ID NO: 312, 313, 315, 317, 318, 319, 320 or 323).

[0015] A second aspect relates to a recombinant host cell comprising a heterologous polynucleotide encoding a glycerol transporter or a glucose transporter. In one embodiment, the glucose transporter is a sodium-coupled glucose transporter.

[0016] In one embodiment of the second aspect, the cell comprises a heterologous polynucleotide encoding a glycerol transporter, and wherein the heterologous polynucleotide encoding the glycerol transporter is operably linked to a promoter that is foreign to the polynucleotide.

[0017] In one embodiment of the second aspect, the glycerol transporter has an amino acid sequence with at least 60%, e.g., at least 65%, 70%, 75%, 80%, 85%, 90%, 95%, 97%, 98%, 99%, or 100% sequence identity, to the amino acid sequence of any one of the glycerol transporters described herein (e.g., any one of SEQ ID NOs: 312-323, such as SEQ ID NO: 312, 313, 315, 317, 318, 319, 320 or 323). In one embodiment, the glycerol transporter differs by no more than ten amino acids, e.g., by no more than five amino acids, by no more than four amino acids, by no more than three amino acids, by no more than two amino acids, or by one amino acid from the amino acid sequence of any one of the glycerol transporters described herein (e.g., any one of SEQ ID NOs: 312-323, such as SEQ ID NO: 312, 313, 315, 317, 318, 319, 320 or 323). In one embodiment, the glycerol transporter comprises or consists of the amino acid sequence of any one of glycerol transporters described herein (e.g., any one of SEQ ID NOs: 312-323, such as SEQ ID NO: 312, 313, 315, 317, 318, 319, 320 or 323).

[0018] In one embodiment of the second aspect, the cell comprises a heterologous polynucleotide encoding a glucose transporter, and wherein the heterologous polynucleotide encoding the glucose transporter is operably linked to a promoter that is foreign to the polynucleotide.

[0019] In one embodiment of the second aspect, the glucose transporter has an amino acid sequence with at least 60%, e.g., at least 65%, 70%, 75%, 80%, 85%, 90%, 95%, 97%, 98%, 99%, or 100% sequence identity, to the amino acid sequence of any one of the glucose transporters described herein (e.g., any one of SEQ ID NOs: 354-364; such as SEQ ID NO: 361, 362, 363, or 364). In one embodiment, the glucose transporter differs by no more than ten amino acids, e.g., by no more than five amino acids, by no more than four amino acids, by no more than three amino acids, by no more than two amino acids, or by one amino acid from the amino acid sequence of any one of the glucose transporters described herein (e.g., any one of SEQ ID NOs: 354-364; such as SEQ ID NO: 361, 362, 363, or 364). In one embodiment, the glucose transporter comprises or consists of the amino acid sequence of any one of glucose transporters described herein (e.g., any one of SEQ ID NOs: 354-364; such as SEQ ID NO: 361, 362, 363, or 364).

[0020] In one embodiment of the second aspect, the cell further comprises a heterologous polynucleotide encoding a non-phosphorylating NADP-dependent glyceraldehyde-3-phosphate dehydrogenase (GAPN). In one embodiment, the non-phosphorylating NADP-dependent glyceraldehyde-3-phosphate dehydrogenase (GAPN) has a mature polypeptide sequence with at least 60%, e.g., at least 65%, 70%, 75%, 80%, 85%, 90%, 95%, 97%, 98%, 99%, or 100% sequence identity to any one of SEQ ID NOs: 262-280 and 365-391. In one embodiment, the heterologous polynucleotide encoding a non-phosphorylating NADP-dependent glyceraldehyde-3-phosphate dehydrogenase (GAPN) is operably linked to a promoter that is foreign to the polynucleotide. In one embodiment, the non-phosphorylating NADP-dependent glyceraldehyde-3-phosphate dehydrogenase (GAPN) has a mature polypeptide sequence that differs by no more than ten amino acids, e.g., by no more than five amino acids, by no more than four amino acids, by no more than three amino acids, by no more than two amino acids, or by one amino acid from any one of SEQ ID NOs: 262-280 and 365-391. In one embodiment, the non-phosphorylating NADP-dependent glyceraldehyde-3-phosphate dehydrogenase (GAPN) has a mature polypeptide sequence comprising or consisting of the amino acid sequence of any one SEQ ID NOs: 262-280 and 365-391.

[0021] In one embodiment of the first or second aspect, the recombinant host cell comprises an active xylose fermentation pathway. In one embodiment, the cell comprises one or more active xylose fermentation pathway genes selected from: a heterologous polynucleotide encoding a xylose isomerase (XI), and a heterologous polynucleotide encoding a xylulokinase (XK). In one embodiment, the cell comprises one or more active xylose fermentation pathway genes selected from: a heterologous polynucleotide encoding a xylose reductase (XR), a heterologous polynucleotide encoding a xylitol dehydrogenase (XDH), and a heterologous polynucleotide encoding a xylulokinase (XK).

[0022] In one embodiment of the first or second aspect, the recombinant host cell comprises an active arabinose fermentation pathway. In one embodiment, cell comprises one or more active arabinose fermentation pathway genes selected from: a heterologous polynucleotide encoding a L-arabinose isomerase (AI), a heterologous polynucleotide encoding a L-ribulokinase (RK), and a heterologous polynucleotide encoding a L-ribulose-5-P4-epimerase (R5PE). In one embodiment, the cell comprises one or more active arabinose fermentation pathway genes selected from: a heterologous polynucleotide encoding an aldose reductase (AR), a heterologous polynucleotide encoding a L-arabinitol 4-dehydrogenase (LAD), a heterologous polynucleotide encoding a L-xylulose reductase (LXR), a heterologous polynucleotide encoding a xylitol dehydrogenase (XDH) and a heterologous polynucleotide encoding a xylulokinase (XK).

[0023] In one embodiment of the first or second aspect, the recombinant host cell comprises an active xylose fermentation pathway and an active arabinose fermentation pathway.

[0024] In one embodiment of the first or second aspect, the recombinant host cell further comprises a heterologous polynucleotide encoding a glucoamylase. In one embodiment, the glucoamylase has a mature polypeptide sequence with at least 60%, e.g., at least 65%, 70%, 75%, 80%, 85%, 90%, 95%, 97%, 98%, 99%, or 100% sequence identity the amino acid sequence of any one of SEQ ID NOs: 8, 102-113, 229, 230 and 244-250. In one embodiment, the heterologous polynucleotide is operably linked to a promoter that is foreign to the polynucleotide.

[0025] In one embodiment of the first or second aspect, the recombinant host cell further comprises a heterologous polynucleotide encoding an alpha-amylase. In one embodiment, the alpha-amylase has a mature polypeptide sequence with at least 60%, e.g., at least 65%, 70%, 75%, 80%, 85%, 90%, 95%, 97%, 98%, 99%, or 100% sequence identity the amino acid sequence of any one of SEQ ID NOs: 76-101, 121-174, 231 and 251-256. In one embodiment, the heterologous polynucleotide is operably linked to a promoter that is foreign to the polynucleotide.

[0026] In one embodiment of the first or second aspect, the recombinant host cell further comprises a heterologous polynucleotide encoding a phospholipase. In one embodiment, the phospholipase has a mature polypeptide sequence with at least 60%, e.g., at least 65%, 70%, 75%, 80%, 85%, 90%, 95%, 97%, 98%, 99%, or 100% sequence identity the amino acid sequence of any one of SEQ ID NOs: 235, 236, 237, 238, 239, 240, 241 and 242. In one embodiment, the heterologous polynucleotide is operably linked to a promoter that is foreign to the polynucleotide.

[0027] In one embodiment of the first or second aspect, the recombinant host cell further comprises a heterologous polynucleotide encoding a trehalase. In one embodiment, the trehalase has a mature polypeptide sequence with at least 60%, e.g., at least 65%, 70%, 75%, 80%, 85%, 90%, 95%, 97%, 98%, 99%, or 100% sequence identity the amino acid sequence of any one of SEQ ID NOs: 175-226. In one embodiment, the heterologous polynucleotide is operably linked to a promoter that is foreign to the polynucleotide.

[0028] In one embodiment of the first or second aspect, the recombinant host cell further comprises a heterologous polynucleotide encoding a protease. In one embodiment, the protease has a mature polypeptide sequence with at least 60%, e.g., at least 65%, 70%, 75%, 80%, 85%, 90%, 95%, 97%, 98%, 99%, or 100% sequence identity the amino acid sequence of any one of SEQ ID NOs: 9-73. In one embodiment, the heterologous polynucleotide is operably linked to a promoter that is foreign to the polynucleotide.

[0029] In one embodiment of the first or second aspect, the recombinant host cell further comprises a heterologous polynucleotide encoding a pullulanase. In one embodiment, the pullulanase has a mature polypeptide sequence with at least 60%, e.g., at least 65%, 70%, 75%, 80%, 85%, 90%, 95%, 97%, 98%, 99%, or 100% sequence identity the amino acid sequence of any one of SEQ ID NOs: 114-120. In one embodiment, the heterologous polynucleotide is operably linked to a promoter that is foreign to the polynucleotide.

[0030] In one embodiment of the first or second aspect, the recombinant host cell further comprises a heterologous polynucleotide encoding a transketolase (TKL1). In one embodiment, the cell further comprises a heterologous polynucleotide encoding a transaldolase (TAL1).

[0031] In one embodiment of the first or second aspect, the recombinant cell further comprises a disruption (e.g., inactivation) to an endogenous gene encoding a glycerol 3-phosphate dehydrogenase (GPD). In one embodiment, the cell further comprises a disruption (e.g., inactivation) to an endogenous gene encoding a glycerol 3-phosphatase (GPP). In one embodiment, the cell produces a decreased amount of glycerol (e.g., at least 25% less, at least 50% less, at least 60% less, at least 70% less, at least 80% less, or at least 90% less) compared to the cell without the disruption to the endogenous gene encoding the GPD and/or GPP when cultivated under identical conditions.

[0032] In one embodiment of the first or second aspect, the recombinant host cell is capable of higher ethanol production compared to the same cell without the heterologous polynucleotide encoding the glycerol transporter, the heterologous polynucleotide encoding the glucose transporter, and/or the heterologous polynucleotide encoding the non-phosphorylating NADP-dependent glyceraldehyde-3-phosphate dehydrogenase (GAPN) under the same conditions (e.g., after 40 hours of fermentation). In one embodiment, the recombinant host cell is capable of reduced glycerol production compared to the same cell without the heterologous polynucleotide encoding the glycerol transporter, the heterologous polynucleotide encoding the glucose transporter, and/or the heterologous polynucleotide encoding the non-phosphorylating NADP-dependent glyceraldehyde-3-phosphate dehydrogenase (GAPN) under the same conditions (e.g., after 40 hours of fermentation). In one embodiment, the recombinant host cell is capable of reduced acetate production compared to the same cell without the heterologous polynucleotide encoding the glycerol transporter, the heterologous polynucleotide encoding the glucose transporter, and/or the heterologous polynucleotide encoding the non-phosphorylating NADP-dependent glyceraldehyde-3-phosphate dehydrogenase (GAPN) under the same conditions (e.g., after 40 hours of fermentation). In one embodiment, the recombinant host cell is capable of reduced succinate production compared to the same cell without the heterologous polynucleotide encoding the glycerol transporter, the heterologous polynucleotide encoding the glucose transporter, and/or the heterologous polynucleotide encoding the non-phosphorylating NADP-dependent glyceraldehyde-3-phosphate dehydrogenase (GAPN) under the same conditions (e.g., after 40 hours of fermentation).

[0033] In one embodiment of the first or second aspect, the recombinant host cell is a yeast cell. In one embodiment, the cell is a Saccharomyces, Rhodotorula, Schizosaccharomyces, Kluyveromyces, Pichia, Hansenula, Rhodosporidium, Candida, Yarrowia, Lipomyces, Cryptococcus, or Dekkera sp. yeast cell. In one embodiment, the cell is Saccharomyces cerevisiae.

[0034] A third aspect relates to methods of producing a fermentation product from a starch-containing or cellulosic-containing material, the method comprising:
[0035] (a) saccharifying the starch-containing or cellulosic-containing material; and
[0036] (b) fermenting the saccharified material of step (a) with the recombinant host cell of the first or second aspect.

[0037] In one embodiment of the third aspect, the method comprises liquefying the starch-containing material at a temperature above the initial gelatinization temperature in the presence of an alpha-amylase and/or a protease prior to saccharification. In one embodiment, the fermentation product is ethanol.

[0038] A fourth aspect relates to methods of producing a derivative of host cell of the first or second aspect, comprising culturing a host cell of the first or second aspect with a second host cell under conditions which permit combining of DNA between the first and second host cells, and screening or selecting for a derived host cell.

[0039] A fifth aspect relates to compositions comprising the host cell of the first or second aspect with one or more naturally occurring and/or non-naturally occurring components, such as components selected from the group consisting of: surfactants, emulsifiers, gums, swelling agents, and antioxidants.

[0040] A sixth aspect relates to a co-culture comprising the recombinant host cell of the first or second aspect.

### BRIEF DESCRIPTION OF THE FIGURES

[0041] FIG. 1 shows a plasmid map for pMLBA638.

[0042] FIG. 2 shows a plasmid map for HP34.

[0043] FIG. 3 shows a plasmid map for TH13.

[0044] FIG. 4 shows final ethanol concentration produced by yeast strains expressing a glycerol transporter during 96-well corn mash fermentation described in Example 2.

[0045] FIG. 5 shows final glycerol concentration produced by yeast strains expressing a glycerol transporter during 96-well corn mash fermentation described in Example 2.

[0046] FIG. 6 shows the final ethanol concentration produced by yeast strains expressing a glycerol transporter during fermentation using corn mash produced industrially by a liquefaction blend described in Example 3.

[0047] FIG. 7 shows Final glycerol concentration produced by yeast strains expressing a glycerol transporter during fermentation using corn mash produced industrially by a liquefaction blend described in Example 3.

[0048] FIG. 8 shows the final succinic acid concentration produced by yeast strains expressing a glycerol transporter during fermentation using corn mash produced industrially by a liquefaction blend described in Example 3.

[0049] FIG. 9 shows the final acetic acid concentration produced by yeast strains expressing a glycerol transporter during fermentation using corn mash produced industrially by a liquefaction blend described in Example 3.

[0050] FIG. 10 shows the final ethanol concentration produced by yeast strains expressing a glycerol transporter during fermentation using corn mash produced industrially by a liquefaction blend described in Example 4.

[0051] FIG. 11 shows the final glycerol concentration produced by yeast strains expressing a glycerol transporter during fermentation using corn mash produced industrially by a liquefaction blend described in Example 4.

[0052] FIG. 12 shows the final succinic acid concentration produced by yeast strains expressing a glycerol transporter during fermentation using corn mash produced industrially by a liquefaction blend described in Example 4.

[0053] FIG. 13 shows the acetic acid concentration produced by yeast strains expressing a glycerol transporter during fermentation using corn mash produced industrially by a liquefaction blend described in Example 4.

[0054] FIG. 14 shows the profile of ethanol production by yeast strains expressing a glycerol transporter during ethanol fermentation using corn mash produced industrially by a liquefaction blend described in Example 5.

[0055] FIG. 15 shows the final ethanol concentration produced by yeast strains expressing a glycerol transporter during fermentation using corn mash produced industrially by a liquefaction blend described in Example 5.

[0056] FIG. 16 shows the profile of glycerol production by yeast strains expressing a glycerol transporter during ethanol fermentation using corn mash produced industrially by a liquefaction blend described in Example 5.

[0057] FIG. 17 shows the profile of succinic acid production by yeast strains expressing a glycerol transporter during ethanol fermentation using corn mash produced industrially by a liquefaction blend described in Example 5.

[0058] FIG. 18 shows the profile of acetic acid production by yeast strains expressing a glycerol transporter during ethanol fermentation using corn mash produced industrially by a liquefaction blend described in Example 5.

[0059] FIG. 19 shows the final ethanol concentration produced by yeast strains expressing a glucose transporter during fermentation using corn mash produced industrially by a liquefaction blend described in Example 7.

[0060] FIG. 20 shows the final glycerol concentration produced by yeast strains expressing a glucose transporter during fermentation using corn mash produced industrially by a liquefaction blend described in Example 7.

[0061] FIG. 21 shows the final succinic acid concentration produced by yeast strains expressing a glucose transporter during fermentation using corn mash produced industrially by a liquefaction blend described in Example 7.

[0062] FIG. 22 shows the final acetic acid concentration produced by yeast strains expressing a glucose transporter during fermentation using corn mash produced industrially by a liquefaction blend described in Example 7.

[0063] FIG. 23 shows the final ethanol concentration produced by yeast strains expressing a glucose transporter during fermentation using corn mash produced industrially by a liquefaction blend described in Example 8.

[0064] FIG. 24 shows the final glycerol concentration produced by yeast strains expressing a glucose transporter during fermentation using corn mash produced industrially by a liquefaction blend described in Example 8.

[0065] FIG. 25 shows the final succinic acid concentration produced by yeast strains expressing a glucose transporter during fermentation using corn mash produced industrially by a liquefaction blend described in Example 8.

[0066] FIG. 26 shows the final acetic acid concentration produced by yeast strains expressing a glucose transporter during fermentation using corn mash produced industrially by a liquefaction blend described in Example 8.

[0067] FIG. 27 shows a plasmid map for pMLBA647.

[0068] FIG. 28 shows a plasmid map for pMLBA775.

[0069] FIG. 29 shows the final ethanol concentration produced by yeast strains expressing a glucose transporter and a non-phosphorylating NADP-dependent glyceraldehyde-3-phosphate dehydrogenase (gapN) during fermentation as described in Example 11.

[0070] FIG. 30 shows the final glycerol concentration produced by yeast strains expressing a glucose transporter and a non-phosphorylating NADP-dependent glyceraldehyde-3-phosphate dehydrogenase (gapN) during fermentation as described in Example 11.

### DEFINITIONS

[0071] Unless defined otherwise or clearly indicated by context, all technical and scientific terms used herein have the same meaning as commonly understood by one of ordinary skill in the art.

[0072] Aldose reductase: The term “aldose reductase” or “AR” is classified as E.C. 1.1.1.21 and means an enzyme that catalyzes the conversion of L-arabinose to L-arabitol. Some aldose reductase genes may be unspecific and have activity on D-xylose to produce xylitol (AKA, D-xylose reductase; classified as E.C. 1.1.1.307). Aldose reductase activity can be determined using methods known in the art (e.g., Kuhn, et al., 1995, Appl. Environ. Microbiol. 61 (4), 1580-1585).

[0073] Allelic variant: The term “allelic variant” means any of two or more alternative forms of a gene occupying the same chromosomal locus. Allelic variation arises naturally through mutation, and may result in polymorphism within populations. Gene mutations can be silent (no change in the encoded polypeptide) or may encode polypeptides having altered amino acid sequences. An allelic variant of a polypeptide is a polypeptide encoded by an allelic variant of a gene.

[0074] Alpha-amylase: The term “alpha amylase” means an 1,4-alpha-D-glucan glucanohydrolase, EC. 3.2.1.1, which catalyze hydrolysis of starch and other linear and branched 1,4-glucosidic oligo- and polysaccharides. Alpha-amylase activity can be determined using methods known in the art (e.g., using an alpha amylase assay described WO2020/023411).

[0075] L-arabinitol dehydrogenase: The term “L-arabinitol dehydrogenase” or “LAD” is classified as E.C. 1.1.1.12 and means an enzyme that catalyzes the conversion of L-arabitol to L-xylulose. L-arabinitol dehydrogenase activity can be determined using methods known in the art (e.g., as described in U.S. Pat. No. 7,527,951).

[0076] Auxiliary Activity 9: The term “Auxiliary Activity 9” or “AA9” means a polypeptide classified as a lytic polysaccharide monooxygenase (Quinlan et al., 2011, Proc. Natl. Acad. Sci. USA 208: 15079-15084; Phillips et al., 2011, ACS Chem. Biol. 6: 1399-1406; Lin et al., 2012, Structure 20: 1051-1061). AA9 polypeptides were formerly classified into the glycoside hydrolase Family 61 (GH61) according to Henrissat, 1991, Biochem. J. 280: 309-316, and Henrissat and Bairoch, 1996, Biochem. J. 316: 695-696.

[0077] AA9 polypeptides enhance the hydrolysis of a cellulosic-containing material by an enzyme having cellulolytic activity. Cellulolytic enhancing activity can be determined by measuring the increase in reducing sugars or the increase of the total of cellobiose and glucose from the hydrolysis of a cellulosic-containing material by cellulolytic enzyme under the following conditions: 1-50 mg of total protein/g of cellulose in pretreated corn stover (PCS), wherein total protein is comprised of 50-99.5% w/w cellulolytic enzyme protein and 0.5-50% w/w protein of an AA9 polypeptide for 1-7 days at a suitable temperature, such as 40 C-80° C., e.g., 50° C., 55° C., 60° C., 65° C., or 70° C., and a suitable pH, such as 4-9, e.g., 4.5, 5.0, 5.5, 6.0, 6.5, 7.0, 7.5, 8.0, or 8.5, compared to a control hydrolysis with equal total protein loading without cellulolytic enhancing activity (1-50 mg of cellulolytic protein/g of cellulose in PCS).

[0078] AA9 polypeptide enhancing activity can be determined using a mixture of CELLUCLAST® 1.5 L (Novozymes A/S, Bagsværd, Denmark) and beta-glucosidase as the source of the cellulolytic activity, wherein the beta-glucosidase is present at a weight of at least 2-5% protein of the cellulase protein loading. In one embodiment, the beta-glucosidase is an Aspergillus oryzae beta-glucosidase (e.g., recombinantly produced in Aspergillus oryzae according to WO 02/095014). In another embodiment, the beta-glucosidase is an Aspergillus fumigatus beta-glucosidase (e.g., recombinantly produced in Aspergillus oryzae as described in WO 02/095014).

[0079] AA9 polypeptide enhancing activity can also be determined by incubating an AA9 polypeptide with 0.5% phosphoric acid swollen cellulose (PASC), 100 mM sodium acetate pH 5, 1 mM MnSO₄, 0.1% gallic acid, 0.025 mg/ml of Aspergillus fumigatus beta-glucosidase, and 0.01% TRITON® X-100 (4-(1,1,3,3-tetramethylbutyl)phenyl-polyethylene glycol) for 24-96 hours at 40° C. followed by determination of the glucose released from the PASC.

[0080] AA9 polypeptide enhancing activity can also be determined according to WO 2013/028928 for high temperature compositions.

[0081] AA9 polypeptides enhance the hydrolysis of a cellulosic-containing material catalyzed by enzyme having cellulolytic activity by reducing the amount of cellulolytic enzyme required to reach the same degree of hydrolysis preferably at least 1.01-fold, e.g., at least 1.05-fold, at least 1.10-fold, at least 1.25-fold, at least 1.5-fold, at least 2-fold, at least 3-fold, at least 4-fold, at least 5-fold, at least 10-fold, or at least 20-fold.

[0082] Beta-glucosidase: The term “beta-glucosidase” means a beta-D-glucoside glucohydrolase (E.C. 3.2.1.21) that catalyzes the hydrolysis of terminal non-reducing beta-D-glucose residues with the release of beta-D-glucose. Beta-glucosidase activity can be determined using p-nitrophenyl-beta-D-glucopyranoside as substrate according to the procedure of Venturi et al., 2002, J. Basic Microbiol. 42: 55-66. One unit of beta-glucosidase is defined as 1.0 μmole of p-nitrophenolate anion produced per minute at 25° C., pH 4.8 from 1 mM p-nitrophenyl-beta-D-glucopyranoside as substrate in 50 mM sodium citrate containing 0.01% TWEEN® 20.

[0083] Beta-xylosidase: The term “beta-xylosidase” means a beta-D-xyloside xylohydrolase (E.C. 3.2.1.37) that catalyzes the exo-hydrolysis of short beta (1→4)-xylooligosaccharides to remove successive D-xylose residues from non-reducing termini. Beta-xylosidase activity can be determined using 1 mM p-nitrophenyl-beta-D-xyloside as substrate in 100 mM sodium citrate containing 0.01% TWEEN® 20 at pH 5, 40° C. One unit of beta-xylosidase is defined as 1.0 μmole of p-nitrophenolate anion produced per minute at 40° C., pH 5 from 1 mM p-nitrophenyl-beta-D-xyloside in 100 mM sodium citrate containing 0.01% TWEEN® 20.

[0084] Catalase: The term “catalase” means a hydrogen-peroxide:hydrogen-peroxide oxidoreductase (EC 1.11.1.6) that catalyzes the conversion of 2 H₂O₂ to O₂+2 H₂O. For purposes of the present invention, catalase activity is determined according to U.S. Pat. No. 5,646,025. One unit of catalase activity equals the amount of enzyme that catalyzes the oxidation of 1 μmole of hydrogen peroxide under the assay conditions.

[0085] Catalytic domain: The term “catalytic domain” means the region of an enzyme containing the catalytic machinery of the enzyme.

[0086] Cellobiohydrolase: The term “cellobiohydrolase” means a 1,4-beta-D-glucan cellobiohydrolase (E.C. 3.2.1.91 and E.C. 3.2.1.176) that catalyzes the hydrolysis of 1,4-beta-D-glucosidic linkages in cellulose, cellooligosaccharides, or any beta-1,4-linked glucose containing polymer, releasing cellobiose from the reducing end (cellobiohydrolase 1) or non-reducing end (cellobiohydrolase 1l) of the chain (Teeri, 1997, Trends in Biotechnology 15: 160-167; Teen et al., 1998, Biochem. Soc. Trans. 26:173-178). Cellobiohydrolase activity can be determined according to the procedures described by Lever et al., 1972, Anal. Biochem. 47: 273-279; van Tilbeurgh et al., 1982, FEBS Letters 149: 152-156; van Tilbeurgh and Claeyssens, 1985, FEBS Letters 187: 283-288; and Tomme et al., 1988, Eur. J. Biochem. 170: 575-581.

[0087] Cellulolytic enzyme or cellulase: The term “cellulolytic enzyme” or “cellulase” means one or more (e.g., several) enzymes that hydrolyze a cellulosic-containing material. Such enzymes include endoglucanase(s), cellobiohydrolase(s), beta-glucosidase(s), or combinations thereof. The two basic approaches for measuring cellulolytic enzyme activity include: (1) measuring the total cellulolytic enzyme activity, and (2) measuring the individual cellulolytic enzyme activities (endoglucanases, cellobiohydrolases, and beta-glucosidases) as reviewed in Zhang et al., 2006, Biotechnology Advances 24: 452-481. Total cellulolytic enzyme activity can be measured using insoluble substrates, including Whatman NW1 filter paper, microcrystalline cellulose, bacterial cellulose, algal cellulose, cotton, pretreated lignocellulose, etc. The most common total cellulolytic activity assay is the filter paper assay using Whatman No 1 filter paper as the substrate. The assay was established by the International Union of Pure and Applied Chemistry (IUPAC) (Ghose, 1987, Pure Appl. Chem. 59: 257-68).

[0088] Cellulolytic enzyme activity can be determined by measuring the increase in production/release of sugars during hydrolysis of a cellulosic-containing material by cellulolytic enzyme(s) under the following conditions: 1-50 mg of cellulolytic enzyme protein/g of cellulose in pretreated corn stover (PCS) (or other pretreated cellulosic-containing material) for 3-7 days at a suitable temperature such as 40° C.-80° C., e.g., 50° C., 55° C., 60° C., 65° C., or 70° C., and a suitable pH such as 4-9, e.g., 5.0, 5.5, 6.0, 6.5, or 7.0, compared to a control hydrolysis without addition of cellulolytic enzyme protein. Typical conditions are 1 ml reactions, washed or unwashed PCS, 5% insoluble solids (dry weight), 50 mM sodium acetate pH 5, 1 mM MnSO₄, 50° C., 55° C., or 60° C., 72 hours, sugar analysis by AMINEX® HPX-87H column chromatography (Bio-Rad Laboratories, Inc., Hercules, CA, USA).

[0089] Coding sequence: The term “coding sequence” or “coding region” means a polynucleotide sequence, which specifies the amino acid sequence of a polypeptide. The boundaries of the coding sequence are generally determined by an open reading frame, which usually begins with the ATG start codon or alternative start codons such as GTG and TTG and ends with a stop codon such as TAA, TAG, and TGA. The coding sequence may be a sequence of genomic DNA, cDNA, a synthetic polynucleotide, and/or a recombinant polynucleotide.

[0090] Control sequence: The term “control sequence” means a nucleic acid sequence necessary for polypeptide expression. Control sequences may be native or foreign to the polynucleotide encoding the polypeptide, and native or foreign to each other. Such control sequences include, but are not limited to, a leader sequence, polyadenylation sequence, propeptide sequence, promoter sequence, signal peptide sequence, and transcription terminator sequence. The control sequences may be provided with linkers for the purpose of introducing specific restriction sites facilitating ligation of the control sequences with the coding region of the polynucleotide encoding a polypeptide.

[0091] Disruption: The term “disruption” means that a coding region and/or control sequence of a referenced gene is partially or entirely modified (such as by deletion, insertion, and/or substitution of one or more nucleotides) resulting in the absence (inactivation) or decrease in expression, and/or the absence or decrease of enzyme activity of the encoded polypeptide. The effects of disruption can be measured using techniques known in the art such as detecting the absence or decrease of enzyme activity using from cell-free extract measurements referenced herein; or by the absence or decrease of corresponding mRNA (e.g., at least 25% decrease, at least 50% decrease, at least 60% decrease, at least 70% decrease, at least 80% decrease, or at least 90% decrease); the absence or decrease in the amount of corresponding polypeptide having enzyme activity (e.g., at least 25% decrease, at least 50% decrease, at least 60% decrease, at least 70% decrease, at least 80% decrease, or at least 90% decrease); or the absence or decrease of the specific activity of the corresponding polypeptide having enzyme activity (e.g., at least 25% decrease, at least 50% decrease, at least 60% decrease, at least 70% decrease, at least 80% decrease, or at least 90% decrease). Disruptions of a particular gene of interest can be generated by methods known in the art, e.g., by directed homologous recombination (see Methods in Yeast Genetics (1997 edition), Adams, Gottschling, Kaiser, and Stems, Cold Spring Harbor Press (1998)).

[0092] Endogenous gene: The term “endogenous gene” means a gene that is native to the referenced host cell. “Endogenous gene expression” means expression of an endogenous gene.

[0093] Endoglucanase: The term “endoglucanase” means a 4-(1,3;1,4)-beta-D-glucan 4-glucanohydrolase (E.C. 3.2.1.4) that catalyzes endohydrolysis of 1,4-beta-D-glycosidic linkages in cellulose, cellulose derivatives (such as carboxymethyl cellulose and hydroxyethyl cellulose), lichenin, beta-1,4 bonds in mixed beta-1,3-1,4 glucans such as cereal beta-D-glucans or xyloglucans, and other plant material containing cellulosic components. Endoglucanase activity can be determined by measuring reduction in substrate viscosity or increase in reducing ends determined by a reducing sugar assay (Zhang et al., 2006, Biotechnology Advances 24: 452-481). Endoglucanase activity can also be determined using carboxymethyl cellulose (CMC) as substrate according to the procedure of Ghose, 1987, Pure and Appl. Chem. 59: 257-268, at pH 5, 40° C.

[0094] Expression: The term “expression” includes any step involved in the production of the polypeptide including, but not limited to, transcription, post-transcriptional modification, translation, post-translational modification, and secretion. Expression can be measured—for example, to detect increased expression—by techniques known in the art, such as measuring levels of mRNA and/or translated polypeptide.

[0095] Expression vector: The term “expression vector” means a linear or circular DNA molecule that comprises a polynucleotide encoding a polypeptide and is operably linked to control sequences that provide for its expression.

[0096] Fermentable medium: The term “fermentable medium” or “fermentation medium” refers to a medium comprising one or more (e.g., two, several) sugars, such as glucose, fructose, sucrose, cellobiose, xylose, xylulose, arabinose, mannose, galactose, and/or soluble oligosaccharides, wherein the medium is capable, in part, of being converted (fermented) by a host cell into a desired product, such as ethanol. In some instances, the fermentation medium is derived from a natural source, such as sugar cane, starch, or cellulose, and may be the result of pretreating the source by enzymatic hydrolysis (saccharification). The term fermentation medium is understood herein to refer to a medium before the fermenting organism is added, such as, a medium resulting from a saccharification process, as well as a medium used in a simultaneous saccharification and fermentation process (SSF).

[0097] Glucoamylase: The term “glucoamylase” (1,4-alpha-D-glucan glucohydrolase, EC 3.2.1.3) is defined as an enzyme that catalyzes the release of D-glucose from the non-reducing ends of starch or related oligo- and polysaccharide molecules. For purposes of the present invention, glucoamylase activity may be determined according to the procedures known in the art, such as those described in WO2020/023411.

[0098] Glucose Transporter: The term “glucose transporter” is defined as a polypeptide that facilitates the transport of glucose across the plasma membrane under fermentation conditions. Methods of determining glucose transport activity are known in the art (e.g., Maier et al., 2002, FEMS Yeast Research 2(4): 539-550).

[0099] Glycerol Transporter: The term “glycerol transporter” is defined as a polypeptide that facilitates the transport of glycerol across the plasma membrane under fermentation conditions. Methods of determining glycerol transport activity are known in the art (e.g., Ferreira et al., 2005, Mol Biol Cell 16(4): 2068-2076).

[0100] Hemicellulolytic enzyme or hemicellulase: The term “hemicellulolytic enzyme” or “hemicellulase” means one or more (e.g., several) enzymes that hydrolyze a hemicellulosic material. See, for example, Shallom and Shoham, 2003, Current Opinion In Microbiology 6(3): 219-228). Hemicellulases are key components in the degradation of plant biomass. Examples of hemicellulases include, but are not limited to, an acetylmannan esterase, an acetylxylan esterase, an arabinanase, an arabinofuranosidase, a coumaric acid esterase, a feruloyl esterase, a galactosidase, a glucuronidase, a glucuronoyl esterase, a mannanase, a mannosidase, a xylanase, and a xylosidase. The substrates for these enzymes, hemicelluloses, are a heterogeneous group of branched and linear polysaccharides that are bound via hydrogen bonds to the cellulose microfibrils in the plant cell wall, crosslinking them into a robust network. Hemicelluloses are also covalently attached to lignin, forming together with cellulose a highly complex structure. The variable structure and organization of hemicelluloses require the concerted action of many enzymes for its complete degradation. The catalytic modules of hemicellulases are either glycoside hydrolases (GHs) that hydrolyze glycosidic bonds, or carbohydrate esterases (CEs), which hydrolyze ester linkages of acetate or ferulic acid side groups. These catalytic modules, based on homology of their primary sequence, can be assigned into GH and CE families. Some families, with an overall similar fold, can be further grouped into clans, marked alphabetically (e.g., GH-A). A most informative and updated classification of these and other carbohydrate active enzymes is available in the Carbohydrate-Active Enzymes (CAZy) database. Hemicellulolytic enzyme activities can be measured according to Ghose and Bisaria, 1987, Pure & Appl. Chem. 59: 1739-1752, at a suitable temperature such as 40° C.-80° C., e.g., 50° C., 55° C., 60° C., 65° C., or 70° C., and a suitable pH such as 4-9, e.g., 5.0, 5.5, 6.0, 6.5, or 7.0.

[0101] Heterologous polynucleotide: The term “heterologous polynucleotide” is defined herein as a polynucleotide that is not native to the host cell; a native polynucleotide in which structural modifications have been made to the coding region; a native polynucleotide whose expression is quantitatively altered as a result of a manipulation of the DNA by recombinant DNA techniques, e.g., a different (foreign) promoter; or a native polynucleotide in a host cell having one or more extra copies of the polynucleotide to quantitatively alter expression. A “heterologous gene” is a gene comprising a heterologous polynucleotide.

[0102] High stringency conditions: The term “high stringency conditions” means for probes of at least 100 nucleotides in length, prehybridization and hybridization at 42° C. in 5×SSPE, 0.3% SDS, 200 micrograms/ml sheared and denatured salmon sperm DNA, and 50% formamide, following standard Southern blotting procedures for 12 to 24 hours. The carrier material is finally washed three times each for 15 minutes using 0.2×SSC, 0.2% SDS at 65° C.

[0103] Host cell: The term “host cell” means any cell type that is susceptible to transformation, transfection, transduction, and the like with a nucleic acid construct or expression vector comprising a polynucleotide described herein. The term “host cell” encompasses any progeny of a parent cell that is not identical to the parent cell due to mutations that occur during replication. The term “recombinant cell” is defined herein as a non-naturally occurring host cell comprising one or more (e.g., two, several) heterologous polynucleotides.

[0104] Low stringency conditions: The term “low stringency conditions” means for probes of at least 100 nucleotides in length, prehybridization and hybridization at 42° C. in 5×SSPE, 0.3% SDS, 200 micrograms/ml sheared and denatured salmon sperm DNA, and 25% formamide, following standard Southern blotting procedures for 12 to 24 hours. The carrier material is finally washed three times each for 15 minutes using 0.2×SSC, 0.2% SDS at 50° C.

[0105] Mature polypeptide: The term “mature polypeptide” is defined herein as a polypeptide having biological activity that is in its final form following translation and any post-translational modifications, such as N-terminal processing, C-terminal truncation, glycosylation, phosphorylation, etc. The mature polypeptide sequence lacks a signal sequence, which may be determined using techniques known in the art (See, e.g., Zhang and Henzel, 2004, Protein Science 13: 2819-2824). The term “mature polypeptide coding sequence” means a polynucleotide that encodes a mature polypeptide.

[0106] Medium stringency conditions: The term “medium stringency conditions” means for probes of at least 100 nucleotides in length, prehybridization and hybridization at 42° C. in 5×SSPE, 0.3% SDS, 200 micrograms/ml sheared and denatured salmon sperm DNA, and 35% formamide, following standard Southern blotting procedures for 12 to 24 hours. The carrier material is finally washed three times each for 15 minutes using 0.2×SSC, 0.2% SDS at 55° C.

[0107] Medium-high stringency conditions: The term “medium-high stringency conditions” means for probes of at least 100 nucleotides in length, prehybridization and hybridization at 42° C. in 5×SSPE, 0.3% SDS, 200 micrograms/ml sheared and denatured salmon sperm DNA, and 35% formamide, following standard Southern blotting procedures for 12 to 24 hours. The carrier material is finally washed three times each for 15 minutes using 0.2×SSC, 0.2% SDS at 60° C.

[0108] Non-phosphorylating NADP-dependent glyceraldehyde-3-phosphate dehydrogenase (GAPN): The term “non-phosphorylating NADP-dependent glyceraldehyde-3-phosphate dehydrogenase”, “NADP-dependent glyceraldehyde-3-phosphate dehydrogenase” or “GAPN” is defined herein as an enzyme that catalyzes the chemical reaction of glyceraldehyde-3-phosphate and NADP+ to 3-phosphoglycerate and NADPH (e.g., EC 1.2.1.9). GAPN activity may be determined from cell-free extracts as described in the art, e.g., as described in Tamoi et al., 1996, Biochem. J. 316, 685-690. For example, GAPN activity may be measured spectrophotometrically by monitoring the absorbance change following NADPH oxidation at 340 nm in a reaction mixture containing 100 mM Tris/HCl buffer (pH 8.0), 10 mM MgCl₂, 10 mM GSH, 5 mM ATP, 0.2 mM NADPH, 2 units of 3-phosphoglyceric phosphokinase, 2 mM 3-phosphoglyceric acid and the enzyme.

[0109] Nucleic acid construct: The term “nucleic acid construct” means a polynucleotide comprises one or more (e.g., two, several) control sequences. The polynucleotide may be single-stranded or double-stranded, and may be isolated from a naturally occurring gene, modified to contain segments of nucleic acids in a manner that would not otherwise exist in nature, or synthetic.

[0110] Operably linked: The term “operably linked” means a configuration in which a control sequence is placed at an appropriate position relative to the coding sequence of a polynucleotide such that the control sequence directs expression of the coding sequence.

[0111] Pentose: The term “pentose” means a five-carbon monosaccharide (e.g., xylose, arabinose, ribose, lyxose, ribulose, and xylulose). Pentoses, such as D-xylose and L-arabinose, may be derived, e.g., through saccharification of a plant cell wall polysaccharide.

[0112] Active pentose fermentation pathway: As used herein, a host cell or fermenting organism having an “active pentose fermentation pathway” produces active enzymes necessary to catalyze each reaction of a metabolic pathway in a sufficient amount to produce a fermentation product (e.g., ethanol) from pentose, and therefore is capable of producing the fermentation product in measurable yields when cultivated under fermentation conditions in the presence of pentose. A host cell or fermenting organism having an active pentose fermentation pathway comprises one or more active pentose fermentation pathway genes. A “pentose fermentation pathway gene” as used herein refers to a gene that encodes an enzyme involved in an active pentose fermentation pathway. In some embodiments, the active pentose fermentation pathway is an “active xylose fermentation pathway” (ie produces a fermentation product, such as ethanol, from xylose) or an “active arabinose fermentation pathway (ie produces a fermentation product, such as ethanol, from arabinose).

[0113] The active enzymes necessary to catalyze each reaction in an active pentose fermentation pathway may result from activities of endogenous gene expression, activities of heterologous gene expression, or from a combination of activities of endogenous and heterologous gene expression, as described in more detail herein.

[0114] Phospholipase: The term “phospholipase” means an enzyme that catalyzes the conversion of phospholipids into fatty acids and other lipophilic substances, such as phospholipase A (EC numbers 3.1.1.4, 3.1.1.5 and 3.1.1.32) or phospholipase C (EC numbers 3.1.4.3 and 3.1.4.11). Phospholipase activity may be determined using activity assays known in the art.

[0115] Pretreated corn stover: The term “Pretreated Corn Stover” or “PCS” means a cellulosic-containing material derived from corn stover by treatment with heat and dilute sulfuric acid, alkaline pretreatment, neutral pretreatment, or any pretreatment known in the art.

[0116] Protease: The term “protease” is defined herein as an enzyme that hydrolyses peptide bonds. It includes any enzyme belonging to the EC 3.4 enzyme group (including each of the thirteen subclasses thereof). The EC number refers to Enzyme Nomenclature 1992 from NC-IUBMB, Academic Press, San Diego, California, including supplements 1-5 published in Eur. J. Biochem. 223: 1-5 (1994); Eur. J. Biochem. 232: 1-6 (1995); Eur. J. Biochem. 237: 1-5 (1996); Eur. J. Biochem. 250: 1-6 (1997); and Eur. J. Biochem. 264: 610-650 (1999); respectively. The term “subtilases” refer to a sub-group of serine protease according to Siezen et al., 1991, Protein Engng. 4: 719-737 and Siezen et al., 1997, Protein Science 6: 501-523. Serine proteases or serine peptidases is a subgroup of proteases characterised by having a serine in the active site, which forms a covalent adduct with the substrate. Further the subtilases (and the serine proteases) are characterised by having two active site amino acid residues apart from the serine, namely a histidine and an aspartic acid residue. The subtilases may be divided into 6 sub-divisions, i.e. the Subtilisin family, the Thermitase family, the Proteinase K family, the Lantibiotic peptidase family, the Kexin family and the Pyrolysin family. The term “protease activity” means a proteolytic activity (EC 3.4). Protease activity may be determined using methods described in the art (e.g., US 2015/0125925) or using commercially available assay kits (e.g., Sigma-Aldrich).

[0117] Pullulanase: The term “pullulanase” means a starch debranching enzyme having pullulan 6-glucano-hydrolase activity (EC 3.2.1.41) that catalyzes the hydrolysis the α-1,6-glycosidic bonds in pullulan, releasing maltotriose with reducing carbohydrate ends. For purposes of the present invention, pullulanase activity can be determined according to a PHADEBAS assay or the sweet potato starch assay described in WO2016/087237.

[0118] Sequence Identity: The relatedness between two amino acid sequences or between two nucleotide sequences is described by the parameter “sequence identity”.

[0119] For purposes described herein, the degree of sequence identity between two amino acid sequences is determined using the Needleman-Wunsch algorithm (Needleman and Wunsch, J. Mol. Biol. 1970, 48, 443-453) as implemented in the Needle program of the EMBOSS package (EMBOSS: The European Molecular Biology Open Software Suite, Rice et al., Trends Genet 2000, 16, 276-277), preferably version 3.0.0 or later. The optional parameters used are gap open penalty of 10, gap extension penalty of 0.5, and the EBLOSUM62 (EMBOSS version of BLOSUM62) substitution matrix. The output of Needle labeled “longest identity” (obtained using the -nobrief option) is used as the percent identity and is calculated as follows:

$$( Identical Residues \times 100 ) / ( Length of the Referenced Sequence - Total Number of Gaps in Alignmnet )$$

[0120] For purposes described herein, the degree of sequence identity between two deoxyribonucleotide sequences is determined using the Needleman-Wunsch algorithm (Needleman and Wunsch, 1970, supra) as implemented in the Needle program of the EMBOSS package (EMBOSS: The European Molecular Biology Open Software Suite, Rice et al., 2000, supra), preferably version 3.0.0 or later. The optional parameters used are gap open penalty of 10, gap extension penalty of 0.5, and the EDNAFULL (EMBOSS version of NCBI NUC4.4) substitution matrix. The output of Needle labeled “longest identity” (obtained using the -nobrief option) is used as the percent identity and is calculated as follows:

(Identical Deoxyribonucleotides×100)/(Length of Referenced Sequence−Total Number of Gaps in Alignment)

[0121] Signal peptide: The term “signal peptide” is defined herein as a peptide linked (fused) in frame to the amino terminus of a polypeptide having biological activity and directs the polypeptide into the cell's secretory pathway. Signal sequences may be determined using techniques known in the art (See, e.g., Zhang and Henzel, 2004, Protein Science 13: 2819-2824).

[0122] Trehalase: The term “trehalase” means an enzyme which degrades trehalose into its unit monosaccharides (i.e., glucose). Trehalases are classified in EC 3.2.1.28 (alpha,alpha-trehalase) and EC. 3.2.1.93 (alpha,alpha-phosphotrehalase). The EC classes are based on recommendations of the Nomenclature Committee of the International Union of Biochemistry and Molecular Biology (IUBMB). Description of EC classes can be found on the internet, e.g., on “http://www.expasy.org/enzyme/”. Trehalases are enzymes that catalyze the following reactions:
[0123] EC 3.2.1.28: Alpha,alpha-trehalose+H₂O [symbol] 2 D-glucose;
[0124] EC 3.2.1. 93: Alpha,alpha-trehalose 6-phosphate+H₂O [symbol] D-glucose+D-glucose 6-phosphate.

[0125] Trehalase activity may be determined according to procedures known in the art.

[0126] Very high stringency conditions: The term “very high stringency conditions” means for probes of at least 100 nucleotides in length, prehybridization and hybridization at 42° C. in 5×SSPE, 0.3% SDS, 200 micrograms/ml sheared and denatured salmon sperm DNA, and 50% formamide, following standard Southern blotting procedures for 12 to 24 hours. The carrier material is finally washed three times each for 15 minutes using 0.2×SSC, 0.2% SDS at 70° C.

[0127] Very low stringency conditions: The term “very low stringency conditions” means for probes of at least 100 nucleotides in length, prehybridization and hybridization at 42° C. in 5×SSPE, 0.3% SDS, 200 micrograms/ml sheared and denatured salmon sperm DNA, and 25% formamide, following standard Southern blotting procedures for 12 to 24 hours. The carrier material is finally washed three times each for 15 minutes using 0.2×SSC, 0.2% SDS at 45° C.

[0128] Xylanase: The term “xylanase” means a 1,4-beta-D-xylan-xylohydrolase (E.C. 3.2.1.8) that catalyzes the endohydrolysis of 1,4-beta-D-xylosidic linkages in xylans. Xylanase activity can be determined with 0.2% AZCL-arabinoxylan as substrate in 0.01% TRITON® X-100 and 200 mM sodium phosphate pH 6 at 37° C. One unit of xylanase activity is defined as 1.0 μmole of azurine produced per minute at 37° C., pH 6 from 0.2% AZCL-arabinoxylan as substrate in 200 mM sodium phosphate pH 6.

[0129] Xylitol dehydrogenase: The term “xylitol dehydrogenase” or “XDH” (AKA D-xylulose reductase) is classified as E.C. 1.1.1.9 and means an enzyme that catalyzes the conversion of xylitol to D-xylulose. Xylitol dehydrogenase activity can be determined using methods known in the art (e.g., Richard et al., 1999, FEBS Letters 457, 135-138).

[0130] Xylose isomerase: The term “xylose isomerase” or “XI” means an enzyme which can catalyze D-xylose into D-xylulose in vivo, and convert D-glucose into D-fructose in vitro. Xylose isomerase is also known as “glucose isomerase” and is classified as E.C. 5.3.1.5. As the structure of the enzyme is very stable, the xylose isomerase is a good model for studying the relationships between protein structure and functions (Karimaki et al., Protein Eng Des Sel, 12004, 17 (12):861-869). Xylose Isomerase activity may be determined using techniques known in the art (e.g., a coupled enzyme assay using D-sorbitol dehygrogenase, as described by Verhoeven et. al., 2017, Sci Rep 7, 46155).

[0131] Xylulokinase: The term “xylulokinase” or “XK” is classified as E.C. 2.7.1.17 and means an enzyme that catalyzes the conversion of D-xylulose to D-xylulose 5-phosphate. Xylulokinase activity can be determined using methods known in the art (e.g., Richard et al., 2000, FEBS Microbiol. Letters 190, 39-43) L-xylulose reductase: The term “L-xylulose reductase” or “LXR” is classified as E.D. 1.1.1.10 and means an enzyme that catalyzes the conversion of L-xylulose to xylitol. L-xylulose reductase activity can be determined using methods known in the art (e.g., as described in U.S. Pat. No. 7,527,951).

[0132] Reference to “about” a value or parameter herein includes embodiments that are directed to that value or parameter per se. For example, description referring to “about X” includes the embodiment “X”. When used in combination with measured values, “about” includes a range that encompasses at least the uncertainty associated with the method of measuring the particular value, and can include a range of plus or minus two standard deviations around the stated value.

[0133] Likewise, reference to a gene or polypeptide that is “derived from” another gene or polypeptide X, includes the gene or polypeptide X.

[0134] As used herein and in the appended claims, the singular forms “a,” “or,” and “the” include plural referents unless the context clearly dictates otherwise.

[0135] It is understood that the embodiments described herein include “consisting” and/or “consisting essentially of” embodiments. As used herein, except where the context requires otherwise due to express language or necessary implication, the word “comprise” or variations such as “comprises” or “comprising” is used in an inclusive sense, i.e. to specify the presence of the stated features but not to preclude the presence or addition of further features in various embodiments.

### DETAILED DESCRIPTION

[0136] Described herein, inter alia, are host cells/fermentation organism, and methods for producing a fermentation product, such as ethanol, from starch or cellulosic containing material. The Applicant has discovered unexpectedly that yeast expressing a glycerol transporter together with a non-phosphorylating NADP-dependent glyceraldehyde-3-phosphate dehydrogenase (GAPN) produce significantly less glycerol. The Applicant has further found that yeast expressing certain glycerol or glucose transporters show remarkably improved ethanol production, decreased glycerol production, decreased succinic acid production and/or decreased acetic acid production. The Applicant also surprisingly found that sodium-coupled glucose transporters (e.g., SEQ ID NOs: 358 and 363) which not expected to generate an ATP drain provided exceptional fermentation performance.

[0137] In one aspect is a method of producing a fermentation product from a starch-containing or cellulosic-containing material comprising:
[0138] (a) saccharifying the starch-containing or cellulosic-containing material; and
[0139] (b) fermenting the saccharified material of step (a) with a recombinant host cell;
   [0140] wherein the host cell comprises a heterologous polynucleotide encoding a glycerol transporter and a heterologous polynucleotide encoding a heterologous polynucleotide encoding non-phosphorylating NADP-dependent glyceraldehyde-3-phosphate dehydrogenase (GAPN).

[0141] In another aspect is a method of producing a fermentation product from a starch-containing or cellulosic-containing material comprising:
[0142] (a) saccharifying the starch-containing or cellulosic-containing material; and
[0143] (b) fermenting the saccharified material of step (a) with a recombinant host cell;
   [0144] wherein the host cell comprises a heterologous polynucleotide encoding a glycerol transporter or a heterologous polynucleotide encoding a glucose transporter.

[0145] Steps a) and b) in either aspect may be carried out either sequentially or simultaneously (SSF). In one embodiment, steps a) and b) are carried out simultaneously (SSF). In another embodiment, steps a) and b) are carried out sequentially.

[0146] In some embodiments, the host cell or fermenting organism (or processes thereof), provides reduced glycerol production when compared to the same cell without the heterologous polynucleotide encoding a glucose transporter, non-phosphorylating NADP-dependent glyceraldehyde-3-phosphate dehydrogenase (GAPN), and/or glycerol transporter described herein under the same conditions (e.g., after 40 hours of fermentation). In some embodiments, the process results in at least 0.25%, such as 0.5%, 0.75%, 1.0%, 2%, 3%, 5%, 10%, 15%, 20%, 25%, 30%, 35%, 40%, 45%, 50%, 60%, 70%, 80%, or 90% reduction of glycerol.

[0147] In some embodiments, the host cell or fermenting organism (or processes thereof), provides higher yield of fermentation product (e.g., ethanol) when compared to the same cell without the heterologous polynucleotide encoding a glucose transporter, non-phosphorylating NADP-dependent glyceraldehyde-3-phosphate dehydrogenase (GAPN) and/or glycerol transporter described herein under the same conditions (e.g., after 40 hours of fermentation). In some embodiments, the process results in at least 0.25%, such as 0.5%, 0.75%, 1.0%, 1.25%, 1.5%, 1.75%, 2%, 3% or 5% higher yield of the fermentation product (e.g., ethanol).

[0148] In some embodiments, the host cell or fermenting organism (or processes thereof), provides reduced acetate production when compared to the same cell without the heterologous polynucleotide encoding a glucose transporter, non-phosphorylating NADP-dependent glyceraldehyde-3-phosphate dehydrogenase (GAPN), and/or glycerol transporter described herein under the same conditions (e.g., after 40 hours of fermentation). In some embodiments, the process results in at least 0.25%, such as 0.5%, 0.75%, 1.0%, 2%, 3%, 5%, 10%, 15%, 20%, 25%, 30%, 35%, 40%, 45%, 50%, 60%, 70%, 80%, or 90% reduction of acetate.

[0149] In some embodiments, the host cell or fermenting organism (or processes thereof), provides reduced succinate production when compared to the same cell without the heterologous polynucleotide encoding a glucose transporter, non-phosphorylating NADP-dependent glyceraldehyde-3-phosphate dehydrogenase (GAPN), and/or glycerol transporter described herein under the same conditions (e.g., after 40 hours of fermentation). In some embodiments, the process results in at least 0.25%, such as 0.5%, 0.75%, 1.0%, 2%, 3%, 5%, 10%, 15%, 20%, 25%, 30%, 35%, 40%, 45%, 50%, 60%, 70%, 80%, or 90% reduction of succinate.

### Host Cells and Fermenting Organisms

[0150] The host cells and fermenting organisms described herein may be derived from any host cell known to the skilled artisan, such as a cell capable of producing a fermentation product (e.g., ethanol). As used herein, a “derivative” of strain is derived from a referenced strain, such as through mutagenesis, recombinant DNA technology, mating, cell fusion, or cytoduction between yeast strains. Those skilled in the art will understand that the genetic alterations, including metabolic modifications exemplified herein, may be described with reference to a suitable host organism and their corresponding metabolic reactions or a suitable source organism for desired genetic material such as genes for a desired metabolic pathway. However, given the complete genome sequencing of a wide variety of organisms and the high level of skill in the area of genomics, those skilled in the art can apply the teachings and guidance provided herein to other organisms. For example, the metabolic alterations exemplified herein can readily be applied to other species by incorporating the same or analogous encoding nucleic acid from species other than the referenced species.

[0151] The host cells described herein can be from any suitable host, such as a yeast strain, including, but not limited to, a Saccharomyces, Rhodotorula, Schizosaccharomyces, Kluyveromyces, Pichia, Hansenula, Rhodosporidium, Candida, Yarrowia, Lipomyces, Cryptococcus, or Dekkera sp. cell. In particular, Saccharomyces host cells are contemplated, such as Saccharomyces cerevisiae, bayanus or carlsbergensis cells. Preferably, the yeast cell is a Saccharomyces cerevisiae cell. Suitable cells can, for example, be derived from commercially available strains and polyploid or aneuploid industrial strains, including but not limited to those from Superstart™, THERMOSACC®, C5 FUEL™, XyloFerm®, etc. (Lallemand); RED STAR and ETHANOL RED® (Fermentis/Lesaffre); FALI (AB Mauri); Baker's Best Yeast, Baker's Compressed Yeast, etc. (Fleishmann's Yeast); BIOFERM AFT, XP, CF, and XR (North American Bioproducts Corp.); Turbo Yeast (Gert Strand AB); and FERMIOL® (DSM Specialties). Other useful yeast strains are available from biological depositories such as the American Type Culture Collection (ATCC) or the Deutsche Sammlung von Mikroorganismen und Zellkulturen GmbH (DSMZ), such as, e.g., BY4741 (e.g., ATCC 201388); Y108-1 (ATCC PTA.10567) and NRRL YB-1952 (ARS Culture Collection). Still other S. cerevisiae strains suitable as host cells DBY746, [Alpha][Eta]22, S150-2B, GPY55-15Ba, CEN.PK, USM21, TMB3500, TMB3400, VTT-A-63015, VTT-A-85068, VTT-c-79093 and their derivatives as well as Saccharomyces sp. 1400, 424A (LNH-ST), 259A (LNH-ST) and derivatives thereof. In one embodiment, the recombinant cell is a derivative of a strain Saccharomyces cerevisiae CIBTS1260 (deposited under Accession No. NRRL Y-50973 at the Agricultural Research Service Culture Collection (NRRL), Illinois 61604 U.S.A.).

[0152] The host cell or fermenting organism may be a Saccharomyces strain, e.g., a Saccharomyces cerevisiae strain produced using the method described and concerned in U.S. Pat. No. 8,257,959.

[0153] The strain may also be a derivative of Saccharomyces cerevisiae strain NMI V14/004037 (See, WO2015/143324 and WO2015/143317 each incorporated herein by reference), strain nos. V15/004035, V15/004036, and V15/004037 (See, WO 2016/153924 incorporated herein by reference), strain nos. V15/001459, V15/001460, V15/001461 (See, WO2016/138437 incorporated herein by reference), strain no. NRRL Y67342 (See, WO2018/098381 incorporated herein by reference), strain nos. NRRL Y67549 and NRRL Y67700 (See, WO2019/161227 incorporated herein by reference), or any strain described in WO2017/087330 (incorporated herein by reference).

[0154] The fermenting organisms according to the invention have been generated in order to, e.g., improve fermentation yield and to improve process economy by cutting enzyme costs since part or all of the necessary enzymes needed to improve method performance are be produced by the fermenting organism.

[0155] The host cells and fermenting organisms described herein may utilize expression vectors comprising the coding sequence of one or more (e.g., two, several) heterologous genes linked to one or more control sequences that direct expression in a suitable cell under conditions compatible with the control sequence(s). Such expression vectors may be used in any of the cells and methods described herein. The polynucleotides described herein may be manipulated in a variety of ways to provide for expression of a desired polypeptide. Manipulation of the polynucleotide prior to its insertion into a vector may be desirable or necessary depending on the expression vector. The techniques for modifying polynucleotides utilizing recombinant DNA methods are well known in the art.

[0156] A construct or vector (or multiple constructs or vectors) comprising the one or more (e.g., two, several) heterologous genes may be introduced into a cell so that the construct or vector is maintained as a chromosomal integrant or as a self-replicating extra-chromosomal vector as described earlier.

[0157] The various nucleotide and control sequences may be joined together to produce a recombinant expression vector that may include one or more (e.g., two, several) convenient restriction sites to allow for insertion or substitution of the polynucleotide at such sites.

[0158] Alternatively, the polynucleotide(s) may be expressed by inserting the polynucleotide(s) or a nucleic acid construct comprising the sequence into an appropriate vector for expression. In creating the expression vector, the coding sequence is located in the vector so that the coding sequence is operably linked with the appropriate control sequences for expression.

[0159] The recombinant expression vector may be any vector (e.g., a plasmid or virus) that can be conveniently subjected to recombinant DNA procedures and can bring about expression of the polynucleotide. The choice of the vector will typically depend on the compatibility of the vector with the host cell into which the vector is to be introduced. The vector may be a linear or closed circular plasmid.

[0160] The vector may be an autonomously replicating vector, i.e., a vector that exists as an extrachromosomal entity, the replication of which is independent of chromosomal replication, e.g., a plasmid, an extrachromosomal element, a minichromosome, or an artificial chromosome. The vector may contain any means for assuring self-replication. Alternatively, the vector may be one that, when introduced into the host cell, is integrated into the genome and replicated together with the chromosome(s) into which it has been integrated. Furthermore, a single vector or plasmid or two or more vectors or plasmids that together contain the total DNA to be introduced into the genome of the cell, or a transposon, may be used.

[0161] The expression vector may contain any suitable promoter sequence that is recognized by a cell for expression of a gene described herein. The promoter sequence contains transcriptional control sequences that mediate the expression of the polypeptide. The promoter may be any polynucleotide that shows transcriptional activity in the cell of choice including mutant, truncated, and hybrid promoters, and may be obtained from genes encoding extracellular or intracellular polypeptides either homologous or heterologous to the cell.

[0162] Each heterologous polynucleotide described herein may be operably linked to a promoter that is foreign to the polynucleotide. For example, in one embodiment, the nucleic acid construct encoding the polypeptide of interest is operably linked to a promoter foreign to the polynucleotide.

[0163] The promoters may be identical to or share a high degree of sequence identity (e.g., at least about 80%, at least about 85%, at least about 90%, at least about 95%, at least about 96%, at least about 97%, at least about 98%, or at least about 99%) with a selected native promoter.

[0164] Examples of suitable promoters for directing the transcription of the nucleic acid constructs in a yeast cells, include, but are not limited to, the promoters obtained from the genes for enolase, (e.g., S. cerevisiae enolase or L. orientalis enolase (ENO1)), galactokinase (e.g., S. cerevisiae galactokinase or L. orientalis galactokinase (GAL1)), alcohol dehydrogenase/glyceraldehyde-3-phosphate dehydrogenase (e.g., S. cerevisiae alcohol dehydrogenase/glyceraldehyde-3-phosphate dehydrogenase or L. orientalis alcohol dehydrogenase/glyceraldehyde-3-phosphate dehydrogenase (ADH1, ADH2/GAP)), triose phosphate isomerase (e.g., S. cerevisiae triose phosphate isomerase or L. orientalis triose phosphate isomerase (TPI)), metallothionein (e.g., S. cerevisiae metallothionein or L. orientalis metallothionein (CUP1)), 3-phosphoglycerate kinase (e.g., S. cerevisiae 3-phosphoglycerate kinase or L. orientalis 3-phosphoglycerate kinase (PGK)), PDC1, xylose reductase (XR), xylitol dehydrogenase (XDH), L-(+)-lactate-cytochrome c oxidoreductase (CYB2), translation elongation factor-1 (TEF1), translation elongation factor-2 (TEF2), glyceraldehyde-3-phosphate dehydrogenase (GAPDH), and orotidine 5-phosphate decarboxylase (URA3) genes. Other suitable promoters may be obtained from S. cerevisiae TDH3, HXT7, PGK1, RPL18B and CCW12 genes. Additional useful promoters for yeast host cells are described by Romanos et al., 1992, Yeast 8: 423-488.

[0165] The control sequence may also be a suitable transcription terminator sequence, which is recognized by a host cell to terminate transcription. The terminator sequence is operably linked to the 3′-terminus of the polynucleotide encoding the polypeptide. Any terminator that is functional in the yeast cell of choice may be used. The terminator may be identical to or share a high degree of sequence identity (e.g., at least about 80%, at least about 85%, at least about 90%, at least about 95%, at least about 96%, at least about 97%, at least about 98%, or at least about 99%) with the selected native terminator.

[0166] Suitable terminators for yeast host cells may be obtained from the genes for enolase (e.g., S. cerevisiae or I. orientalis enolase cytochrome C (e.g., S. cerevisiae or I. orientalis cytochrome (CYC1)), glyceraldehyde-3-phosphate dehydrogenase (e.g., S. cerevisiae or I. orientalis glyceraldehyde-3-phosphate dehydrogenase (gpd)), PDC1, XR, XDH, transaldolase (TAL), transketolase (TKL), ribose 5-phosphate ketol-isomerase (RKI), CYB2, and the galactose family of genes (especially the GAL10 terminator). Other suitable terminators may be obtained from S. cerevisiae ENO2 or TEF1 genes. Additional useful terminators for yeast host cells are described by Romanos et al., 1992, supra.

[0167] The control sequence may also be an mRNA stabilizer region downstream of a promoter and upstream of the coding sequence of a gene which increases expression of the gene.

[0168] Examples of suitable mRNA stabilizer regions are obtained from a Bacillus thuringiensis cry/I/A gene (WO 94/25612) and a Bacillus subtilis SP82 gene (Hue et al., 1995, Journal of Bacteriology 177: 3465-3471).

[0169] The control sequence may also be a suitable leader sequence, when transcribed is a non-translated region of an mRNA that is important for translation by the host cell. The leader sequence is operably linked to the 5′-terminus of the polynucleotide encoding the polypeptide. Any leader sequence that is functional in the yeast cell of choice may be used.

[0170] Suitable leaders for yeast host cells are obtained from the genes for enolase (e.g., S. cerevisiae or I. orientalis enolase (ENO-1)), 3-phosphoglycerate kinase (e.g., S. cerevisiae or I. orientalis 3-phosphoglycerate kinase), alpha-factor (e.g., S. cerevisiae or I. orientalis alpha-factor), and alcohol dehydrogenase/glyceraldehyde-3-phosphate dehydrogenase (e.g., S. cerevisiae or I. orientalis alcohol dehydrogenase/glyceraldehyde-3-phosphate dehydrogenase (ADH2/GAP)).

[0171] The control sequence may also be a polyadenylation sequence; a sequence operably linked to the 3′-terminus of the polynucleotide and, when transcribed, is recognized by the host cell as a signal to add polyadenosine residues to transcribed mRNA. Any polyadenylation sequence that is functional in the host cell of choice may be used. Useful polyadenylation sequences for yeast cells are described by Guo and Sherman, 1995, Mol. Cellular Biol. 15: 5983-5990.

[0172] The control sequence may also be a signal peptide coding region that encodes a signal peptide linked to the N-terminus of a polypeptide and directs the polypeptide into the cell's secretory pathway. The 5′-end of the coding sequence of the polynucleotide may inherently contain a signal peptide coding sequence naturally linked in translation reading frame with the segment of the coding sequence that encodes the polypeptide. Alternatively, the 5′-end of the coding sequence may contain a signal peptide coding sequence that is foreign to the coding sequence. A foreign signal peptide coding sequence may be required where the coding sequence does not naturally contain a signal peptide coding sequence. Alternatively, a foreign signal peptide coding sequence may simply replace the natural signal peptide coding sequence in order to enhance secretion of the polypeptide. However, any signal peptide coding sequence that directs the expressed polypeptide into the secretory pathway of a host cell may be used. Useful signal peptides for yeast host cells are obtained from the genes for Saccharomyces cerevisiae alpha-factor and Saccharomyces cerevisiae invertase. Other useful signal peptide coding sequences are described by Romanos et al., 1992, supra. Signal peptides are also described in WO2021/025872 “Fusion Proteins For Improved Enzyme Expression” (the content of which is hereby incorporated by reference.

[0173] The control sequence may also be a propeptide coding sequence that encodes a propeptide positioned at the N-terminus of a polypeptide. The resultant polypeptide is known as a proenzyme or propolypeptide (or a zymogen in some cases). A propolypeptide is generally inactive and can be converted to an active polypeptide by catalytic or autocatalytic cleavage of the propeptide from the propolypeptide. The propeptide coding sequence may be obtained from the genes for Bacillus subtilis alkaline protease (aprE), Bacillus subtilis neutral protease (npr7), Myceliophthora thermophila laccase (WO95/33836), Rhizomucor miehei aspartic proteinase, and Saccharomyces cerevisiae alpha-factor.

[0174] Where both signal peptide and propeptide sequences are present, the propeptide sequence is positioned next to the N-terminus of a polypeptide and the signal peptide sequence is positioned next to the N-terminus of the propeptide sequence.

[0175] It may also be desirable to add regulatory sequences that allow the regulation of the expression of the polypeptide relative to the growth of the host cell. Examples of regulatory systems are those that cause the expression of the gene to be turned on or off in response to a chemical or physical stimulus, including the presence of a regulatory compound. Regulatory systems in prokaryotic systems include the lac, tac, and trp operator systems. In yeast, the ADH2 system or GAL1 system may be used.

[0176] The vectors may contain one or more (e.g., two, several) selectable markers that permit easy selection of transformed, transfected, transduced, or the like cells. A selectable marker is a gene the product of which provides for biocide or viral resistance, resistance to heavy metals, prototrophy to auxotrophs, and the like. Suitable markers for yeast host cells include, but are not limited to, ADE2, HIS3, LEU2, LYS2, MET3, TRP1, and URA3.

[0177] The vectors may contain one or more (e.g., two, several) elements that permit integration of the vector into the host cell's genome or autonomous replication of the vector in the cell independent of the genome.

[0178] For integration into the host cell genome, the vector may rely on the polynucleotide's sequence encoding the polypeptide or any other element of the vector for integration into the genome by homologous or non-homologous recombination. Alternatively, the vector may contain additional polynucleotides for directing integration by homologous recombination into the genome of the host cell at a precise location(s) in the chromosome(s). To increase the likelihood of integration at a precise location, the integrational elements should contain a sufficient number of nucleic acids, such as 100 to 10,000 base pairs, 400 to 10,000 base pairs, and 800 to 10,000 base pairs, which have a high degree of sequence identity to the corresponding target sequence to enhance the probability of homologous recombination. The integrational elements may be any sequence that is homologous with the target sequence in the genome of the host cell. Furthermore, the integrational elements may be non-encoding or encoding polynucleotides. On the other hand, the vector may be integrated into the genome of the host cell by non-homologous recombination. Potential integration loci include those described in the art (e.g., See US2012/0135481).

[0179] For autonomous replication, the vector may further comprise an origin of replication enabling the vector to replicate autonomously in the yeast cell. The origin of replication may be any plasmid replicator mediating autonomous replication that functions in a cell. The term “origin of replication” or “plasmid replicator” means a polynucleotide that enables a plasmid or vector to replicate in vivo. Examples of origins of replication for use in a yeast host cell are the 2 micron origin of replication, ARS1, ARS4, the combination of ARS1 and CEN3, and the combination of ARS4 and CEN6.

[0180] More than one copy of a polynucleotide described herein may be inserted into a host cell to increase production of a polypeptide. An increase in the copy number of the polynucleotide can be obtained by integrating at least one additional copy of the sequence into the yeast cell genome or by including an amplifiable selectable marker gene with the polynucleotide where cells containing amplified copies of the selectable marker gene, and thereby additional copies of the polynucleotide, can be selected for by cultivating the cells in the presence of the appropriate selectable agent.

[0181] The procedures used to ligate the elements described above to construct the recombinant expression vectors described herein are well known to one skilled in the art (see, e.g., Sambrook et al., 1989, Molecular Cloning, A Laboratory Manual, 2d edition, Cold Spring Harbor, New York).

[0182] Additional procedures and techniques known in the art for the preparation of recombinant cells for ethanol fermentation, are described in, e.g., WO2016/045569, the content of which is hereby incorporated by reference.

[0183] The host cell or fermenting organism may be in the form of a composition comprising a host cell or fermenting organism (e.g., a yeast strain described herein) and a naturally occurring and/or a non-naturally occurring component.

[0184] The host cell or fermenting organism described herein may be in any viable form, including crumbled, dry, including active dry and instant, compressed, cream (liquid) form etc. In one embodiment, the host cell or fermenting organism (e.g., a Saccharomyces cerevisiae yeast strain) is dry yeast, such as active dry yeast or instant yeast. In one embodiment, the host cell or fermenting organism (e.g., a Saccharomyces cerevisiae yeast strain) is crumbled yeast. In one embodiment, the host cell or fermenting organism (e.g., a Saccharomyces cerevisiae yeast strain) is compressed yeast. In one embodiment, the host cell or fermenting organism (e.g., a Saccharomyces cerevisiae yeast strain) is cream yeast.

[0185] In one embodiment is a composition comprising a host cell or fermenting organism described herein (e.g., a Saccharomyces cerevisiae yeast strain), and one or more of the component selected from the group consisting of: surfactants, emulsifiers, gums, swelling agent, and antioxidants and other processing aids.

[0186] The compositions described herein may comprise a host cell or fermenting organism described herein (e.g., a Saccharomyces cerevisiae yeast strain) and any suitable surfactants. In one embodiment, the surfactant(s) is/are an anionic surfactant, cationic surfactant, and/or nonionic surfactant.

[0187] The compositions described herein may comprise a host cell or fermenting organism described herein (e.g., a Saccharomyces cerevisiae yeast strain) and any suitable emulsifier. In one embodiment, the emulsifier is a fatty-acid ester of sorbitan. In one embodiment, the emulsifier is selected from the group of sorbitan monostearate (SMS), citric acid esters of monodiglycerides, polyglycerolester, fatty acid esters of propylene glycol.

[0188] In one embodiment, the composition comprises a host cell or fermenting organism described herein (e.g., a Saccharomyces cerevisiae yeast strain), and Olindronal SMS, Olindronal SK, or Olindronal SPL including composition concerned in EP 1,724,336 (hereby incorporated by reference). These products are commercially available from Bussetti, Austria, for active dry yeast.

[0189] The compositions described herein may comprise a host cell or fermenting organism described herein (e.g., a Saccharomyces cerevisiae yeast strain) and any suitable gum. In one embodiment, the gum is selected from the group of carob, guar, tragacanth, arabic, xanthan and acacia gum, in particular for cream, compressed and dry yeast.

[0190] The compositions described herein may comprise a host cell or fermenting organism described herein (e.g., a Saccharomyces cerevisiae yeast strain) and any suitable swelling agent. In one embodiment, the swelling agent is methyl cellulose or carboxymethyl cellulose.

[0191] The compositions described herein may comprise a host cell or fermenting organism described herein (e.g., a Saccharomyces cerevisiae yeast strain) and any suitable anti-oxidant. In one embodiment, the antioxidant is butylated hydroxyanisol (BHA) and/or butylated hydroxytoluene (BHT), or ascorbic acid (vitamin C), particular for active dry yeast.

[0192] The compositions described herein may comprise a co-culture of a fermenting organism described herein together with a second non-identical organism. As used herein, “co-culture” refers to growing two different strains or species of host cells together in the same vessel. The two different strains or species may be any organism described herein, or any organism described in the art. The co-cultures can be from different, or same, domains, kingdoms, phylums, classes, subclasses, orders, families, genera, or species. They can also be from different strains of different species or different strains of the same species. In some embodiments, the co-culture comprises two non-identical yeast strains (e.g., two non-identical Saccharomyces cerevisiae yeast strains; or a Saccharomyces cerevisiae yeast strain together with a yeast strain of a different species). In some embodiments, the co-culture is capable of co-fermentation (ie two or more different strains are capable of fermentation, e.g., alcohol fermentation). In some embodiments, the co-culture comprises two or more organisms that express different heterologous polynucleotides (e.g., express any enzymes described herein). Methods of growing co-cultures are known in the art (e.g., WO2015/164058).

[0193] The various host cell strains in the co-culture can be present in about equal numbers or one strain or species of host cell significantly outnumber another second strain or species of host cells. For example, in a co-culture comprising two strains or species of host cells the ratio of one host cell to another can be about 1:1, 1:2, 1:3, 1:4, 1:5, 1:10, 1:100, 1:500, or 1:1000. Similarly, in a co-culture comprising three or more strains or species of host cells, the strains or species of host cells can be present in about equal or unequal amounts.

### Glycerol Transporters

[0194] In some embodiments, the fermenting organism (e.g., recombinant yeast cell) comprises a genetic modification that increases or decreases expression of a glycerol transporter. The transporter may be any suitable transporter that is suitable for improving the transport of glycerol, such as a naturally occurring transporter (e.g., a native transporter from another species or an endogenous transporter expressed from a modified expression vector) or a variant thereof that retains glycerol transporter activity. Glycerol transporter activity can be measured using any suitable assay known in the art.

[0195] In some embodiments, the host cell or fermenting organism comprises a heterologous polynucleotide encoding a glycerol transporter. In some embodiments, the host cell or fermenting organism comprising a heterologous polynucleotide encoding a glycerol transporter has an increased level of glycerol transporter activity compared to the host cell or fermenting organism without the heterologous polynucleotide encoding the glycerol transporter, when cultivated under the same conditions. In some embodiments, the host cell or fermenting organism has an increased level of glycerol transporter activity of at least 5%, e.g., at least 10%, at least 15%, at least 20%, at least 25%, at least 50%, at least 100%, at least 150%, at least 200%, at least 300%, or at 500% compared to host cell or fermenting organism without the heterologous polynucleotide encoding the glycerol transporter, when cultivated under the same conditions.

[0196] Exemplary glycerol transporters that may be expressed with the host cells or fermenting organisms and methods of use described herein include, but are not limited to, glycerol transporters shown in Table 1 (or derivatives thereof).

TABLE 1

| | Donor Organism | Sequence code | SEQ ID NO. |
|---|---|---|---|
| 1 | Schizosaccharomyces pombe | BBV22932 | 312 |
| 2 | Millerozyma farinosa | BFW20975 | 313 |
| 3 | Paramormyrops kingsleyae | A0A3B3QJ49 | 314 |
| 4 | Xenopus tropicalis | BBV22935 | 315 |
| 5 | Plasmodium falciparum | BBV22933 | 316 |
| 6 | Millerozyma farinosa | BGE32929 | 317 |
| 7 | Xenopus laevis | Q8JG68 | 318 |
| 8 | Torulaspora delbrueckii | EFPBZ6P62 | 319 |
| 9 | Debaryomyces castellii | EFP6VCJJF | 320 |
| 10 | Danio rerio | BGE51664 | 321 |
| 11 | Pygoscelis adeliae | A0A093NZE6 | 322 |
| 12 | Zygosaccharomyces rouxii | BGE51665 | 323 |

[0197] Additional polynucleotides encoding suitable glycerol transporters may be derived from microorganisms of any suitable genus, including those readily available within the UniProtKB database.

[0198] The glycerol transporter may be a bacterial transporter. For example, the glycerol transporter may be derived from a Gram-positive bacterium such as a Bacillus, Clostridium, Enterococcus, Geobacillus, Lactobacillus, Lactococcus, Oceanobacillus, Staphylococcus, Streptococcus, or Streptomyces, or a Gram-negative bacterium such as a Campylobacter, E. coli, Flavobacterium, Fusobacterium, Helicobacter, Ilyobacter, Neisseria, Pseudomonas, Salmonella, or Ureaplasma.

[0199] In one embodiment, the glycerol transporter is derived from Bacillus alkalophilus, Bacillus amyloliquefaciens, Bacillus brevis, Bacillus circulans, Bacillus clausii, Bacillus coagulans, Bacillus firmus, Bacillus lautus, Bacillus lentus, Bacillus licheniformis, Bacillus megaterium, Bacillus pumilus, Bacillus stearothermophilus, Bacillus subtilis, or Bacillus thuringiensis.

[0200] In another embodiment, the glycerol transporter is derived from Streptococcus equisimilis, Streptococcus pyogenes, Streptococcus uberis, or Streptococcus equi subsp. Zooepidemicus.

[0201] In another embodiment, the glycerol transporter is derived from Streptomyces achromogenes, Streptomyces avermitilis, Streptomyces coelicolor, Streptomyces griseus, or Streptomyces lividans.

[0202] The glycerol transporter may be a fungal glycerol transporter. For example, the glycerol transporter may be derived from a yeast such as a Candida, Kluyveromyces, Pichia, Saccharomyces, Schizosaccharomyces, Yarrowia or Issatchenkia; or derived from a filamentous fungus such as an Acremonium, Agaricus, Alternaria, Aspergillus, Aureobasidium, Botryosphaeria, Ceriporiopsis, Chaetomidium, Chrysosporium, Claviceps, Cochliobolus, Coprinopsis, Coptotermes, Corynascus, Cryphonectria, Cryptococcus, Diplodia, Exidia, Filibasidium, Fusarium, Gibberella, Holomastigotoides, Humicola, Irpex, Lentinula, Leptospaeria, Magnaporthe, Melanocarpus, Meripilus, Mucor, Myceliophthora, Neocallimastix, Neurospora, Paecilomyces, Penicillium, Phanerochaete, Piromyces, Poitrasia, Pseudoplectania, Pseudotrichonympha, Rhizomucor, Schizophyllum, Scytalidium, Talaromyces, Thermoascus, Thielavia, Tolypocladium, Trichoderma, Trichophaea, Verticillium, Volvariella, or Xylaria.

[0203] In another embodiment, the glycerol transporter is derived from Saccharomyces carlsbergensis, Saccharomyces cerevisiae, Saccharomyces diastaticus, Saccharomyces douglasii, Saccharomyces kluyveri, Saccharomyces norbensis, or Saccharomyces oviformis.

[0204] In another embodiment, the glycerol transporter is derived from Acremonium cellulolyticus, Aspergillus aculeatus, Aspergillus awamori, Aspergillus foetidus, Aspergillus fumigatus, Aspergillus japonicus, Aspergillus nidulans, Aspergillus niger, Aspergillus oryzae, Chrysosporium inops, Chrysosporium keratinophilum, Chrysosporium lucknowense, Chrysosporium merdarium, Chrysosporium pannicola, Chrysosporium queenslandicum, Chrysosporium tropicum, Chrysosporium zonatum, Fusarium bactridioides, Fusarium cerealis, Fusarium crookwellense, Fusarium culmorum, Fusarium graminearum, Fusarium graminum, Fusarium heterosporum, Fusarium negundi, Fusarium oxysporum, Fusarium reticulatum, Fusarium roseum, Fusarium sambucinum, Fusarium sarcochroum, Fusarium sporotrichioides, Fusarium sulphureum, Fusarium torulosum, Fusarium trichothecioides, Fusarium venenatum, Humicola grisea, Humicola insolens, Humicola lanuginosa, Irpex lacteus, Mucor miehei, Myceliophthora thermophila, Neurospora crassa, Penicillium funiculosum, Penicillium purpurogenum, Phanerochaete chrysosporium, Thielavia achromatica, Thielavia albomyces, Thielavia albopilosa, Thielavia australeinsis, Thielavia fimeti, Thielavia microspora, Thielavia ovispora, Thielavia peruviana, Thielavia setosa, Thielavia spededonium, Thielavia subthermophila, Thielavia terrestris, Trichoderma harzianum, Trichoderma koningii, Trichoderma longibrachiatum, Trichoderma reesei, or Trichoderma viride.

[0205] It will be understood that for the aforementioned species, the invention encompasses both the perfect and imperfect states, and other taxonomic equivalents, e.g., anamorphs, regardless of the species name by which they are known. Those skilled in the art will readily recognize the identity of appropriate equivalents.

[0206] Strains of these species are readily accessible to the public in a number of culture collections, such as the American Type Culture Collection (ATCC), Deutsche Sammlung von Mikroorganismen und Zellkulturen GmbH (DSMZ), Centraalbureau Voor Schimmelcultures (CBS), and Agricultural Research Service Patent Culture Collection, Northern Regional Research Center (NRRL).

[0207] The glycerol transporter coding sequences described or referenced herein, or a subsequence thereof, as well as the transporter described or referenced herein, or a fragment thereof, may be used to design nucleic acid probes to identify and clone DNA encoding a glycerol transporter from strains of different genera or species according to methods well known in the art. In particular, such probes can be used for hybridization with the genomic DNA or cDNA of a cell of interest, following standard Southern blotting procedures, in order to identify and isolate the corresponding gene therein. Such probes can be considerably shorter than the entire sequence, but should be at least 15, e.g., at least 25, at least 35, or at least 70 nucleotides in length. Preferably, the nucleic acid probe is at least 100 nucleotides in length, e.g., at least 200 nucleotides, at least 300 nucleotides, at least 400 nucleotides, at least 500 nucleotides, at least 600 nucleotides, at least 700 nucleotides, at least 800 nucleotides, or at least 900 nucleotides in length. Both DNA and RNA probes can be used. The probes are typically labeled for detecting the corresponding gene (for example, with ³²P, ³H, ³⁵S, biotin, or avidin).

[0208] A genomic DNA or cDNA library prepared from such other strains may be screened for DNA that hybridizes with the probes described above and encodes a sugar transporter. Genomic or other DNA from such other strains may be separated by agarose or polyacrylamide gel electrophoresis, or other separation techniques. DNA from the libraries or the separated DNA may be transferred to and immobilized on nitrocellulose or other suitable carrier material. In order to identify a clone or DNA that hybridizes with a coding sequence, or a subsequence thereof, the carrier material is used in a Southern blot.

[0209] In one embodiment, the nucleic acid probe is a polynucleotide, or subsequence thereof, that encodes the glycerol transporter of any one of SEQ ID NOs: 312-323, or a fragment thereof.

[0210] For purposes of the probes described above, hybridization indicates that the polynucleotide hybridizes to a labeled nucleic acid probe, or the full-length complementary strand thereof, or a subsequence of the foregoing; under very low to very high stringency conditions. Molecules to which the nucleic acid probe hybridizes under these conditions can be detected using, for example, X-ray film. Stringency and washing conditions are defined as described supra.

[0211] In one embodiment, the glycerol transporter is encoded by a polynucleotide that hybridizes under at least low stringency conditions, e.g., medium stringency conditions, medium-high stringency conditions, high stringency conditions, or very high stringency conditions with the full-length complementary strand of the coding sequence for any one of the glycerol transporters described or referenced herein (e.g., SEQ ID NOs: 312-323). (Sambrook et al., 1989, Molecular Cloning, A Laboratory Manual, 2d edition, Cold Spring Harbor, New York).

[0212] The glycerol transporter may also be identified and obtained from other sources including microorganisms isolated from nature (e.g., soil, composts, water, silage, etc.) or DNA samples obtained directly from natural materials (e.g., soil, composts, water, silage, etc.) using the above-mentioned probes. Techniques for isolating microorganisms and DNA directly from natural habitats are well known in the art. The polynucleotide encoding a glycerol transporter may then be derived by similarly screening a genomic or cDNA library of another microorganism or mixed DNA sample.

[0213] Once a polynucleotide encoding a glycerol transporter has been detected with a suitable probe as described herein, the sequence may be isolated or cloned by utilizing techniques that are known to those of ordinary skill in the art (See, e.g., Sambrook et al., 1989, supra). Techniques used to isolate or clone polynucleotides encoding glycerol transporters include isolation from genomic DNA, preparation from cDNA, or a combination thereof. The cloning of the polynucleotides from such genomic DNA can be affected, e.g., by using the well-known polymerase chain reaction (PCR) or antibody screening of expression libraries to detect cloned DNA fragments with shares structural features (See, e.g., Innis et al., 1990, PCR: A Guide to Methods and Application, Academic Press, New York). Other nucleic acid amplification procedures such as ligase chain reaction (LCR), ligated activated transcription (LAT) and nucleotide sequence-based amplification (NASBA) may be used.

[0214] In one embodiment, the glycerol transporter comprises or consists of the amino acid sequence of any one of SEQ ID NOs: 312-323 (such as any one of SEQ ID NOs: 312-323 (e.g., SEQ ID NO: 312, 313, 315, 317, 318, 319, 320 or 323)). In another embodiment, the transporter is a fragment of the glycerol transporter of any one of SEQ ID NOs: 312-323 (such as any one of SEQ ID NOs: 312-323 (e.g., SEQ ID NO: 312, 313, 315, 317, 318, 319, 320 or 323)), wherein, e.g., the fragment has glycerol transporter activity. In one embodiment, the number of amino acid residues in the fragment is at least 75%, e.g., at least 80%, 85%, 90%, or 95% of the number of amino acid residues in referenced full length glycerol transporter (e.g. any one of SEQ ID NOs: 312-323; such as any one of SEQ ID NOs: 312-323 (e.g., SEQ ID NO: 312, 313, 315, 317, 318, 319, 320 or 323)). In other embodiments, the glycerol transporter may comprise the catalytic domain of any glycerol transporter described or referenced herein (e.g., the catalytic domain of any one of SEQ ID NOs: 312-323; such as any one of SEQ ID NOs: 312-323 (e.g., SEQ ID NO: 312, 313, 315, 317, 318, 319, 320 or 323)).

[0215] The glycerol transporter may be a variant of any one of the glycerol transporters described supra (e.g., any one of SEQ ID NOs: 312-323; such as any one of SEQ ID NOs: 312-323 (e.g., SEQ ID NO: 312, 313, 315, 317, 318, 319, 320 or 323)). In one embodiment, the glycerol transporter has at least 60%, e.g., at least 65%, 70%, 75%, 80%, 85%, 90%, 95%, 97%, 98%, 99%, or 100% sequence identity to any one of the glycerol transporters described supra (e.g., any one of SEQ ID NOs: 312-323; such as any one of SEQ ID NOs: 312-323 (e.g., SEQ ID NO: 312, 313, 315, 317, 318, 319, 320 or 323)).

[0216] In one embodiment, the glycerol transporter sequence differs by no more than ten amino acids, e.g., by no more than five amino acids, by no more than four amino acids, by no more than three amino acids, by no more than two amino acids, or by one amino acid from the amino acid sequence of any one of the glycerol transporters described supra (e.g., any one of SEQ ID NOs: 312-323; such as any one of SEQ ID NOs: 312-323 (e.g., SEQ ID NO: 312, 313, 315, 317, 318, 319, 320 or 323)). In one embodiment, the glycerol transporter has an amino acid substitution, deletion, and/or insertion of one or more (e.g., two, several) of amino acid sequence of any one of the glycerol transporters described supra (e.g., any one of SEQ ID NOs: 312-323; such as any one of SEQ ID NOs: 312-323 (e.g., SEQ ID NO: 312, 313, 315, 317, 318, 319, 320 or 323)). In some embodiments, the total number of amino acid substitutions, deletions and/or insertions is not more than 10, e.g., not more than 9, 8, 7, 6, 5, 4, 3, 2, or 1.

[0217] The amino acid changes are generally of a minor nature, that is conservative amino acid substitutions or insertions that do not significantly affect the folding and/or activity of the protein; small deletions, typically of one to about 30 amino acids; small amino-terminal or carboxyl-terminal extensions, such as an amino-terminal methionine residue; a small linker peptide of up to about 20-25 residues; or a small extension that facilitates purification by changing net charge or another function, such as a poly-histidine tract, an antigenic epitope or a binding domain.

[0218] Examples of conservative substitutions are within the group of basic amino acids (arginine, lysine and histidine), acidic amino acids (glutamic acid and aspartic acid), polar amino acids (glutamine and asparagine), hydrophobic amino acids (leucine, isoleucine and valine), aromatic amino acids (phenylalanine, tryptophan and tyrosine), and small amino acids (glycine, alanine, serine, threonine and methionine). Amino acid substitutions that do not generally alter specific activity are known in the art and are described, for example, by H. Neurath and R. L. Hill, 1979, In, The Proteins, Academic Press, New York. The most commonly occurring exchanges are Ala/Ser, Val/Ile, Asp/Glu, Thr/Ser, Ala/Gly, Ala/Thr, Ser/Asn, Ala/Val, Ser/Gly, Tyr/Phe, Ala/Pro, Lys/Arg, Asp/Asn, Leu/Ile, Leu/Val, Ala/Glu, and Asp/Gly.

[0219] Alternatively, the amino acid changes are of such a nature that the physico-chemical properties of the polypeptides are altered. For example, amino acid changes may improve the thermal stability of the glycerol transporters, alter the substrate specificity, change the pH optimum, and the like.

[0220] Essential amino acids can be identified according to procedures known in the art, such as site-directed mutagenesis or alanine-scanning mutagenesis (Cunningham and Wells, 1989, Science 244: 1081-1085). In the latter technique, single alanine mutations are introduced at every residue in the molecule, and the resultant mutant molecules are tested for activity to identify amino acid residues that are critical to the activity of the molecule. See also, Hilton et al., 1996, J. Biol. Chem. 271: 4699-4708. The active site or other biological interaction can also be determined by physical analysis of structure, as determined by such techniques as nuclear magnetic resonance, crystallography, electron diffraction, or photoaffinity labeling, in conjunction with mutation of putative contact site amino acids (See, for example, de Vos et al., 1992, Science 255: 306-312; Smith et al., 1992, J. Mol. Biol. 224: 899-904; Wlodaver et al., 1992, FEBS Lett. 309: 59-64). The identities of essential amino acids can also be inferred from analysis of identities with other glycerol transporters that are related to the referenced glycerol transporter.

[0221] Additional guidance on the structure-activity relationship of the glycerol transporters herein can be determined using multiple sequence alignment (MSA) techniques well-known in the art. Based on the teachings herein, the skilled artisan could make similar alignments with any number of glycerol transporters described herein or known in the art. Such alignments aid the skilled artisan to determine potentially relevant domains (e.g., binding domains or catalytic domains), as well as which amino acid residues are conserved and not conserved among the different transporter sequences. It is appreciated in the art that changing an amino acid that is conserved at a particular position between disclosed polypeptides will more likely result in a change in biological activity (Bowie et al., 1990, Science 247: 1306-1310: “Residues that are directly involved in protein functions such as binding or catalysis will certainly be among the most conserved”). In contrast, substituting an amino acid that is not highly conserved among the polypeptides will not likely or significantly alter the biological activity.

[0222] Even further guidance on the structure-activity relationship for the skilled artisan can be found in published x-ray crystallography studies known in the art.

[0223] Single or multiple amino acid substitutions, deletions, and/or insertions can be made and tested using known methods of mutagenesis, recombination, and/or shuffling, followed by a relevant screening procedure, such as those disclosed by Reidhaar-Olson and Sauer, 1988, Science 241: 53-57; Bowie and Sauer, 1989, Proc. Natl. Acad. Sci. USA 86: 2152-2156; WO95/17413; or WO95/22625. Other methods that can be used include error-prone PCR, phage display (e.g., Lowman et al., 1991, Biochemistry 30: 10832-10837; U.S. Pat. No. 5,223,409; WO92/06204), and region-directed mutagenesis (Derbyshire et al., 1986, Gene 46: 145; Ner et al., 1988, DNA 7:127).

[0224] Mutagenesis/shuffling methods can be combined with high-throughput, automated screening methods to detect activity of cloned, mutagenized polypeptides expressed by host cells (Ness et al., 1999, Nature Biotechnology 17: 893-896). Mutagenized DNA molecules that encode active glycerol transporters can be recovered from the host cells and rapidly sequenced using standard methods in the art. These methods allow the rapid determination of the importance of individual amino acid residues in a polypeptide.

[0225] In another embodiment, the heterologous polynucleotide encoding the glycerol transporter comprises a coding sequence having at least 60%, e.g., at least 65%, at least 70%, at least 75%, at least 80%, at least 85%, at least 90%, at least 95%, at least 96%, at least 97%, at least 98%, at least 99%, or 100% sequence identity to the coding sequence of any one of the glycerol transporters described supra (e.g., any one of SEQ ID NOs: 312-323; such as any one of SEQ ID NOs: 312-323 (e.g., SEQ ID NO: 312, 313, 315, 317, 318, 319, 320 or 323)).

[0226] In one embodiment, the heterologous polynucleotide encoding the glycerol transporter comprises or consists of the coding sequence of any one of the glycerol transporters described supra (e.g., any one of SEQ ID NOs: 312-323; such as any one of SEQ ID NOs: 312-323 (e.g., SEQ ID NO: 312, 313, 315, 317, 318, 319, 320 or 323)). In another embodiment, the heterologous polynucleotide encoding the glycerol transporter comprises a subsequence of the coding sequence of any one of the glycerol transporters described supra (e.g., any one of SEQ ID NOs: 312-323; such as any one of SEQ ID NOs: 312-323 (e.g., SEQ ID NO: 312, 313, 315, 317, 318, 319, 320 or 323)) wherein the subsequence encodes a polypeptide having glycerol transporter activity. In another embodiment, the number of nucleotides residues in the coding subsequence is at least 75%, e.g., at least 80%, 85%, 90%, or 95% of the number of the referenced coding sequence.

[0227] The referenced coding sequence of any related aspect or embodiment described herein can be the native coding sequence or a degenerate sequence, such as a codon-optimized coding sequence designed for use in a particular host cell (e.g., optimized for expression in Saccharomyces cerevisiae). Codon-optimization for expression in yeast cells is known in the art (e.g., U.S. Pat. No. 8,326,547).

[0228] The glycerol transporter may be a fused polypeptide or cleavable fusion polypeptide in which another polypeptide is fused at the N-terminus or the C-terminus of the glycerol transporter. A fused polypeptide may be produced by fusing a polynucleotide encoding another polypeptide to a polynucleotide encoding the glycerol transporter. Techniques for producing fusion polypeptides are known in the art, and include ligating the coding sequences encoding the polypeptides so that they are in frame and that expression of the fused polypeptide is under control of the same promoter(s) and terminator. Fusion proteins may also be constructed using intein technology in which fusions are created post-translationally (Cooper et al., 1993, EMBO J. 12: 2575-2583; Dawson et al., 1994, Science 266: 776-779).

[0229] In some embodiments, the glycerol transporter is a fusion protein comprising a signal peptide linked to the N-terminus of a mature polypeptide, such as any signal sequences described in WO2021/025872 “Fusion Proteins For Improved Enzyme Expression” (the content of which is hereby incorporated by reference).

### Glucose Transporters

[0230] In some embodiments, the fermenting organism (e.g., recombinant yeast cell) comprises a genetic modification that increases or decreases expression of a glucose transporter. In some embodiments, the glucose transporter is a sodium-coupled glucose transporter. The transporter may be any suitable transporter that is suitable for improving the transport and/or utilization of glucose, such as a naturally occurring transporter (e.g., a native transporter from another species or an endogenous transporter expressed from a modified expression vector) or a variant thereof that retains sugar transporter activity. Glucose transporter activity can be measured using any suitable assay known in the art.

[0231] In some embodiments, the host cell or fermenting organism comprises a heterologous polynucleotide encoding a glucose transporter. In some embodiments, the host cell or fermenting organism comprising a heterologous polynucleotide encoding a glucose transporter has an increased level of glucose transporter activity compared to the host cell or fermenting organism without the heterologous polynucleotide encoding the glucose transporter, when cultivated under the same conditions. In some embodiments, the host cell or fermenting organism has an increased level of glucose transporter activity of at least 5%, e.g., at least 10%, at least 15%, at least 20%, at least 25%, at least 50%, at least 100%, at least 150%, at least 200%, at least 300%, or at 500% compared to host cell or fermenting organism without the heterologous polynucleotide encoding the glucose transporter, when cultivated under the same conditions.

[0232] Exemplary glucose transporters that may be expressed with the host cells or fermenting organisms and methods of use described herein include, but are not limited to, glucose transporters shown in Table 2 (or derivatives thereof).

TABLE 2

| | Donor Organism | Sequence code | SEQ ID NO. |
|---|---|---|---|
| 1 | Arabidopsis thaliana | A0A178VHL3 | 354 |
| 2 | Arabidopsis thaliana | A0A1P8AWV3 | 355 |
| 3 | Physcomitrella patens | A9RGL7 | 356 |
| 4 | Brassica napus | AWL17596 | 357 |
| 5 | Homo sapiens | BFB33985 | 358 |
| 6 | Glycine max | AWV91652 | 359 |
| 7 | Arabidopsis thaliana | Q9SFG0 | 360 |
| 8 | Cucumis sativus | BAT10300 | 361 |
| 9 | Methanococcoides vulcani | A0A110B6B1 | 362 |
| 10 | Homo sapiens | P13866 | 363 |
| 11 | Populus trichocarpa | B9H5Q5 | 364 |

[0233] Additional polynucleotides encoding suitable glucose transporters may be obtained from microorganisms of any genus, including those readily available within the UniProtKB database.

[0234] The glucose transporters coding sequences can also be used to design nucleic acid probes to identify and clone DNA encoding glucose transporterss from strains of different genera or species, as described supra.

[0235] The polynucleotides encoding glucose transporterss may also be identified and obtained from other sources including microorganisms isolated from nature (e.g., soil, composts, water, etc.) or DNA samples obtained directly from natural materials (e.g., soil, composts, water, etc.) as described supra.

[0236] Techniques used to isolate or clone polynucleotides encoding glucose transporters are described supra.

[0237] In one embodiment, the glucose transporter has a mature polypeptide sequence that comprises or consists of the amino acid sequence of any one of the glucose transporter described or referenced herein (e.g., any one of SEQ ID NOs: 354-364; such as any one of SEQ ID NOs: 361-364). In another embodiment, the glucose transporter has a mature polypeptide sequence that is a fragment of the any one of the glucose transporters described or referenced herein (e.g., any one of SEQ ID NOs: 354-364; such as any one of SEQ ID NOs: 361-364). In one embodiment, the number of amino acid residues in the fragment is at least 75%, e.g., at least 80%, 85%, 90%, or 95% of the number of amino acid residues in referenced full length glucose transporter. In other embodiments, the glucose transporter may comprise the catalytic domain of any glucose transporter described or referenced herein (e.g., any one of SEQ ID NOs: 354-364; such as any one of SEQ ID NOs: 361-364).

[0238] The glucose transporter may be a variant of any one of the glucose transporters described supra (e.g., any one of SEQ ID NOs: 354-364; such as any one of SEQ ID NOs: 361-364). In one embodiment, the glucose transporter has a mature polypeptide sequence of at least 60%, e.g., at least 65%, 70%, 75%, 80%, 85%, 90%, 95%, 97%, 98%, 99%, or 100% sequence identity to any one of the glucose transporters described supra (e.g., any one of SEQ ID NOs: 354-364; such as any one of SEQ ID NOs: 361-364).

[0239] Examples of suitable amino acid changes, such as conservative substitutions that do not significantly affect the folding and/or activity of the glucose transporter, are described herein.

[0240] In one embodiment, the glucose transporter has a mature polypeptide sequence that differs by no more than ten amino acids, e.g., by no more than five amino acids, by no more than four amino acids, by no more than three amino acids, by no more than two amino acids, or by one amino acid from the amino acid sequence of any one of the glucose transporters described supra (e.g., any one of SEQ ID NOs: 354-364; such as SEQ ID NO: 361, 362, 363, or 364). In one embodiment, the glucose transporter has an amino acid substitution, deletion, and/or insertion of one or more (e.g., two, several) of amino acid sequence of any one of the glucose transporters described supra (e.g., any one of SEQ ID NOs: 354-364; such as SEQ ID NO: 361, 362, 363, or 364). In some embodiments, the total number of amino acid substitutions, deletions and/or insertions is not more than 10, e.g., not more than 9, 8, 7, 6, 5, 4, 3, 2, or 1.

[0241] In some embodiments, the glucose transporter has at least 20%, e.g., at least 40%, at least 50%, at least 60%, at least 70%, at least 80%, at least 90%, at least 95%, at least 96%, at least 97%, at least 98%, at least 99%, or 100% of the glucose transporter activity of any glucose transporter described or referenced herein under the same conditions (e.g., any one of SEQ ID NOs: 354-364; such as SEQ ID NO: 361, 362, 363, or 364).

[0242] In one embodiment, the glucose transporter coding sequence hybridizes under at least low stringency conditions, e.g., medium stringency conditions, medium-high stringency conditions, high stringency conditions, or very high stringency conditions with the full-length complementary strand of the coding sequence from any glucose transporter described or referenced herein (e.g., any one of SEQ ID NOs: 354-364; such as SEQ ID NO: 361, 362, 363, or 364). In one embodiment, the glucose transporter coding sequence has at least 65%, e.g., at least 70%, at least 75%, at least 80%, at least 85%, at least 85%, at least 90%, at least 91%, at least 92%, at least 93%, at least 94%, at least 95%, at least 96%, at least 97%, at least 98%, at least 99%, or 100% sequence identity with the coding sequence from any glucose transporter described or referenced herein (e.g., any one of SEQ ID NOs: 354-364; such as SEQ ID NO: 361, 362, 363, or 364).

[0243] In one embodiment, the glucose transporter comprises the coding sequence of any glucose transporter described or referenced herein (e.g., any one of SEQ ID NOs: 354-364; such as SEQ ID NO: 361, 362, 363, or 364). In one embodiment, the glucose transporter comprises a coding sequence that is a subsequence of the coding sequence from any glucose transporter described or referenced herein, wherein the subsequence encodes a polypeptide having glucose transporter activity. In one embodiment, the number of nucleotides residues in the subsequence is at least 75%, e.g., at least 80%, 85%, 90%, or 95% of the number of the referenced coding sequence.

[0244] The referenced glucose transporter coding sequence of any related aspect or embodiment described herein can be the native coding sequence or a degenerate sequence, such as a codon-optimized coding sequence designed for use in a particular host cell (e.g., optimized for expression in Saccharomyces cerevisiae).

[0245] The glucose transporter can also include fused polypeptides or cleavable fusion polypeptides, as described supra.

### Non-Phosphorylating NADP-Dependent Glyceraldehyde-3-Phosphate Dehydrogenases (GAPNs)

[0246] The host cells and fermenting organisms may express a heterologous glucoamylase non-phosphorylating NADP-dependent glyceraldehyde-3-phosphate dehydrogenase (GAPN). The GAPN can be any GAPN that is suitable for the host cells and their methods of use described herein, such as a naturally occurring GAPN (e.g., an endogenous GAPN or a native GAPN from another species) or a variant thereof that retains GAPN activity. In one aspect, GAPN is present in the cytosol of the host cells.

[0247] GAPN activity may be determined from cell-free extracts as described in the art, e.g., as described in Tamoi et al., 1996, Biochem. J. 316, 685-690. For example, GAPN activity may be measured spectrophotometrically by monitoring the absorbance change following NADPH oxidation at 340 nm in a reaction mixture containing 100 mM Tris/HCl buffer (pH 8.0), 10 mM MgCl₂, 10 mM GSH, 5 mM ATP, 0.2 mM NADPH, 2 units of 3-phosphoglyceric phosphokinase, 2 mM 3-phosphoglyceric acid and the enzyme.

[0248] In some embodiments, the host cell or fermenting organism comprises a heterologous polynucleotide encoding a GAPN. In some embodiments, the host cell or fermenting organism comprising a heterologous polynucleotide encoding a GAPN has an increased level of GAPN activity compared to the host cell or fermenting organism without the heterologous polynucleotide encoding the GAPN, when cultivated under the same conditions. In some embodiments, the host cell or fermenting organism has an increased level of GAPN activity of at least 5%, e.g., at least 10%, at least 15%, at least 20%, at least 25%, at least 50%, at least 100%, at least 150%, at least 200%, at least 300%, or at 500% compared to host cell or fermenting organism without the heterologous polynucleotide encoding the GAPN, when cultivated under the same conditions.

[0249] Exemplary GAPNs that may be expressed with the host cells or fermenting organisms and methods of use described herein include, but are not limited to, GAPNs shown in Table 3 (or derivatives thereof).

TABLE 3

| | Donor Organism | Sequence code | SEQ ID NO. |
|---|---|---|---|
| 1 | Triticum aestivum | Q8LK61 | 262 |
| 2 | Chlamydomonas reinhardtii | A0A2K3D5S6 | 263 |
| 3 | Apium graveolens | Q9SNX8 | 264 |
| 4 | Cicer arietinum | A0A1S2YP36 | 265 |
| 5 | Bacillus pseudomycoides | A0A2C4I5G8 | 266 |
| 6 | Streptococcus equinus | Q3C1A6 | 267 |
| 7 | Glycine soja | A0A0B2QEZ3 | 268 |
| 8 | Streptococcus sp. DD12 | A0A139NKR4 | 269 |
| 9 | Bacillus thuringiensis | A0A0B5NZK7 | 270 |
| 10 | Arabidopsis thaliana | Q1WIQ6 | 271 |
| 11 | Bacillus litoralis | EFP8C9GVR | 272 |
| 12 | Streptococcus hyointestinalis | A0A380K8A8 | 273 |
| 13 | Zea mays | Q43272 | 274 |
| 14 | Lactobacillus delbrueckii | Q04A83 | 275 |
| 15 | Streptococcus pluranimalium | A0A2L0D390 | 276 |
| 16 | Nicotiana plumbaginifolia | P93338 | 277 |
| 17 | Streptococcus macacae | G5JUQ8 | 278 |
| 18 | Streptococcus mutans | Q59931 | 279 |
| 19 | Bacillus cereus | | 280 |
| 20 | Streptococcus thermophilus | | 365 |
| 21 | Streptococcus urinalis | | 366 |
| 22 | Streptococcus canis | | 367 |
| 23 | Streptococcus thoraltensis | | 368 |
| 24 | Streptococcus dysgalactiae | | 369 |
| 25 | Streptococcus pyogenes | | 370 |
| 26 | Streptococcus ictaluri | | 371 |
| 27 | Clostridium perfringens | | 372 |
| 28 | Clostridium chromiireducens | | 373 |
| 29 | Clostridium botulinum | | 374 |
| 30 | Bacillus anthracis | | 375 |
| 31 | Pyrococcus furiosus | | 376 |
| 32 | Streptococcus salivarius | A0A3R9HQX1 | 377 |
| 33 | Clostridium acetobutylicum | Q97D25 | 378 |
| 34 | Clostridium pasteurianum | R4K9A4 | 379 |
| 35 | Bacillus licheniformis | Q2HQS0 | 380 |
| 36 | Rhodococcus opacus | W8GZ39 | 381 |
| 37 | Pyrococcus furiosus | Q8U2S5 | 382 |
| 38 | Saccharolobus solfataricus | A0A0E3K5I1 | 383 |
| 39 | Sulfolobus tokodaii | Q96XP0 | 384 |
| 40 | Thermococcus kodakarensis | Q5JG59 | 385 |
| 41 | Thermoproteus tenax | G4RJR5 | 386 |
| 42 | Chlamydomonas reinhardtii | BJM22433 | 387 |
| 43 | Hevea brasiliensis | XP_021650941 | 388 |
| 44 | Apium graveolens | AAF08296 | 389 |
| 45 | Arabidopsis thaliana | ABB83822 | 390 |
| 46 | Triticum aesivum | AAM77679 | 391 |

[0250] Additional polynucleotides encoding suitable GAPNs may be derived from microorganisms of any suitable genus, including those readily available within the UniProtKB database.

[0251] The GAPN coding sequences can also be used to design nucleic acid probes to identify and clone DNA encoding trehalases from strains of different genera or species, as described supra.

[0252] The polynucleotides encoding trehalases may also be identified and obtained from other sources including microorganisms isolated from nature (e.g., soil, composts, water, etc.) or DNA samples obtained directly from natural materials (e.g., soil, composts, water, etc.) as described supra.

[0253] Techniques used to isolate or clone polynucleotides encoding GAPNs are described supra.

[0254] In one embodiment, the GAPN has a mature polypeptide sequence that comprises or consists of the amino acid sequence of any one of the trehalases described or referenced herein (e.g., any one of SEQ ID NOs: 262-280 and 365-391; such as any one of SEQ ID NOs: 262, 263, 264, 265, 266, 267, 268, 269, 270, 271, 272, 273, 274, 275, 276, 277, 278, 279, 280, 365, 366, 367, 368, 369, 370, 371, 372, 373, 374, 375, 376, 377, 378, 379, 380, 381, 382, 383, 384, 385, 386, 387, 388, 389, 390 and 391). In another embodiment, the GAPN has a mature polypeptide sequence that is a fragment of the any one of the GAPNs described or referenced herein (e.g., any one of SEQ ID NOs: 262-280 and 365-391; such as any one of SEQ ID NOs: 262, 263, 264, 265, 266, 267, 268, 269, 270, 271, 272, 273, 274, 275, 276, 277, 278, 279, 280, 365, 366, 367, 368, 369, 370, 371, 372, 373, 374, 375, 376, 377, 378, 379, 380, 381, 382, 383, 384, 385, 386, 387, 388, 389, 390 and 391). In one embodiment, the number of amino acid residues in the fragment is at least 75%, e.g., at least 80%, 85%, 90%, or 95% of the number of amino acid residues in referenced full length GAPN (e.g., any one of SEQ ID NOs: 262-280 and 365-391; such as any one of SEQ ID NOs: 262, 263, 264, 265, 266, 267, 268, 269, 270, 271, 272, 273, 274, 275, 276, 277, 278, 279, 280, 365, 366, 367, 368, 369, 370, 371, 372, 373, 374, 375, 376, 377, 378, 379, 380, 381, 382, 383, 384, 385, 386, 387, 388, 389, 390 and 391). In other embodiments, the GAPN may comprise the catalytic domain of any GAPN described or referenced herein (e.g., the catalytic domain of any one of SEQ ID NOs: 262-280 and 365-391; such as any one of SEQ ID NOs: 262, 263, 264, 265, 266, 267, 268, 269, 270, 271, 272, 273, 274, 275, 276, 277, 278, 279, 280, 365, 366, 367, 368, 369, 370, 371, 372, 373, 374, 375, 376, 377, 378, 379, 380, 381, 382, 383, 384, 385, 386, 387, 388, 389, 390 and 391).

[0255] The GAPN may be a variant of any one of the GAPNs described supra (e.g., any one of SEQ ID NOs: 262-280 and 365-391; such as any one of SEQ ID NOs: 262, 263, 264, 265, 266, 267, 268, 269, 270, 271, 272, 273, 274, 275, 276, 277, 278, 279, 280, 365, 366, 367, 368, 369, 370, 371, 372, 373, 374, 375, 376, 377, 378, 379, 380, 381, 382, 383, 384, 385, 386, 387, 388, 389, 390 and 391). In one embodiment, the GAPN has a mature polypeptide sequence of at least 60%, e.g., at least 65%, 70%, 75%, 80%, 85%, 90%, 95%, 97%, 98%, 99%, or 100% sequence identity to any one of the GAPNs described supra (e.g., any one of SEQ ID NOs: 262-280; such as any one of SEQ ID NOs: 262, 263, 264, 265, 266, 267, 268, 269, 270, 271, 272, 273, 274, 275, 276, 277, 278, 279, 280, 365, 366, 367, 368, 369, 370, 371, 372, 373, 374, 375, 376, 377, 378, 379, 380, 381, 382, 383, 384, 385, 386, 387, 388, 389, 390 and 391).

[0256] Examples of suitable amino acid changes, such as conservative substitutions that do not significantly affect the folding and/or activity of the GAPN, are described herein.

[0257] In one embodiment, the GAPN has a mature polypeptide sequence that differs by no more than ten amino acids, e.g., by no more than five amino acids, by no more than four amino acids, by no more than three amino acids, by no more than two amino acids, or by one amino acid from the amino acid sequence of any one of the GAPNs described supra (e.g., any one of SEQ ID NOs: 262-280 and 365-391; such as any one of SEQ ID NOs: 262, 263, 264, 265, 266, 267, 268, 269, 270, 271, 272, 273, 274, 275, 276, 277, 278, 279, 280, 365, 366, 367, 368, 369, 370, 371, 372, 373, 374, 375, 376, 377, 378, 379, 380, 381, 382, 383, 384, 385, 386, 387, 388, 389, 390 and 391). In one embodiment, the GAPN has an amino acid substitution, deletion, and/or insertion of one or more (e.g., two, several) of amino acid sequence of any one of the GAPNs described supra (e.g., any one of SEQ ID NOs: 262-280 and 365-391; such as any one of SEQ ID NOs: 262, 263, 264, 265, 266, 267, 268, 269, 270, 271, 272, 273, 274, 275, 276, 277, 278, 279, 280, 365, 366, 367, 368, 369, 370, 371, 372, 373, 374, 375, 376, 377, 378, 379, 380, 381, 382, 383, 384, 385, 386, 387, 388, 389, 390 and 391). In some embodiments, the total number of amino acid substitutions, deletions and/or insertions is not more than 10, e.g., not more than 9, 8, 7, 6, 5, 4, 3, 2, or 1.

[0258] In some embodiments, the GAPN has at least 20%, e.g., at least 40%, at least 50%, at least 60%, at least 70%, at least 80%, at least 90%, at least 95%, at least 96%, at least 97%, at least 98%, at least 99%, or 100% of the GAPN activity of any GAPN described or referenced herein (e.g., any one of SEQ ID NOs: 262-280 and 365-391; such as any one of SEQ ID NOs: 262, 263, 264, 265, 266, 267, 268, 269, 270, 271, 272, 273, 274, 275, 276, 277, 278, 279, 280, 365, 366, 367, 368, 369, 370, 371, 372, 373, 374, 375, 376, 377, 378, 379, 380, 381, 382, 383, 384, 385, 386, 387, 388, 389, 390 and 391) under the same conditions.

[0259] In one embodiment, the GAPN coding sequence hybridizes under at least low stringency conditions, e.g., medium stringency conditions, medium-high stringency conditions, high stringency conditions, or very high stringency conditions with the full-length complementary strand of the coding sequence from any GAPN described or referenced herein (e.g., any one of SEQ ID NOs: 262-280 and 365-391; such as any one of SEQ ID NOs: 262, 263, 264, 265, 266, 267, 268, 269, 270, 271, 272, 273, 274, 275, 276, 277, 278, 279, 280, 365, 366, 367, 368, 369, 370, 371, 372, 373, 374, 375, 376, 377, 378, 379, 380, 381, 382, 383, 384, 385, 386, 387, 388, 389, 390 and 391). In one embodiment, the GAPN coding sequence has at least 65%, e.g., at least 70%, at least 75%, at least 80%, at least 85%, at least 85%, at least 90%, at least 91%, at least 92%, at least 93%, at least 94%, at least 95%, at least 96%, at least 97%, at least 98%, at least 99%, or 100% sequence identity with the coding sequence from any GAPN described or referenced herein (e.g., any one of SEQ ID NOs: 262-280 and 365-391; such as any one of SEQ ID NOs: 262, 263, 264, 265, 266, 267, 268, 269, 270, 271, 272, 273, 274, 275, 276, 277, 278, 279, 280, 365, 366, 367, 368, 369, 370, 371, 372, 373, 374, 375, 376, 377, 378, 379, 380, 381, 382, 383, 384, 385, 386, 387, 388, 389, 390 and 391).

[0260] In one embodiment, the GAPN comprises the coding sequence of any GAPN described or referenced herein (e.g., any one of SEQ ID NOs: 262-280 and 365-391; such as any one of SEQ ID NOs: 262, 263, 264, 265, 266, 267, 268, 269, 270, 271, 272, 273, 274, 275, 276, 277, 278, 279, 280, 365, 366, 367, 368, 369, 370, 371, 372, 373, 374, 375, 376, 377, 378, 379, 380, 381, 382, 383, 384, 385, 386, 387, 388, 389, 390 and 391). In one embodiment, the GAPN comprises a coding sequence that is a subsequence of the coding sequence from any GAPN described or referenced herein, wherein the subsequence encodes a polypeptide having GAPN activity. In one embodiment, the number of nucleotides residues in the subsequence is at least 75%, e.g., at least 80%, 85%, 90%, or 95% of the number of the referenced coding sequence.

[0261] The referenced GAPN coding sequence of any related aspect or embodiment described herein can be the native coding sequence or a degenerate sequence, such as a codon-optimized coding sequence designed for use in a particular host cell (e.g., optimized for expression in Saccharomyces cerevisiae).

[0262] The GAPN can also include fused polypeptides or cleavable fusion polypeptides, as described supra.

### Glucoamylases

[0263] The host cells and fermenting organisms may express a heterologous glucoamylase. The glucoamylase can be any glucoamylase that is suitable for the host cells, fermenting organisms and/or their methods of use described herein, such as a naturally occurring glucoamylase or a variant thereof that retains glucoamylase activity. Any glucoamylase contemplated for expression by a host cell or fermenting organism described below is also contemplated for embodiments of the invention involving exogenous addition of a glucoamylase (e.g., added before, during or after liquefaction and/or saccharification).

[0264] In some embodiments, the host cell or fermenting organism comprises a heterologous polynucleotide encoding a glucoamylase, for example, as described in WO2017/087330, the content of which is hereby incorporated by reference. Any glucoamylase described or referenced herein is contemplated for expression in the host cell or fermenting organism.

[0265] In some embodiments, the host cell or fermenting organism comprising a heterologous polynucleotide encoding a glucoamylase has an increased level of glucoamylase activity compared to the host cells without the heterologous polynucleotide encoding the glucoamylase, when cultivated under the same conditions. In some embodiments, the host cell or fermenting organism has an increased level of glucoamylase activity of at least 5%, e.g., at least 10%, at least 15%, at least 20%, at least 25%, at least 50%, at least 100%, at least 150%, at least 200%, at least 300%, or at 500% compared to the host cell or fermenting organism without the heterologous polynucleotide encoding the glucoamylase, when cultivated under the same conditions.

[0266] Exemplary glucoamylases that can be used with the host cells and/or the methods described herein include bacterial, yeast, or filamentous fungal glucoamylases, e.g., obtained from any of the microorganisms described or referenced herein, as described supra.

[0267] Preferred glucoamylases are of fungal or bacterial origin, selected from the group consisting of Aspergillus glucoamylases, in particular Aspergillus niger G1 or G2 glucoamylase (Boel et al. (1984), EMBO J. 3 (5), p. 1097-1102), or variants thereof, such as those disclosed in WO 92/00381, WO 00/04136 and WO 01/04273 (from Novozymes, Denmark); the A. awamori glucoamylase disclosed in WO 84/02921, Aspergillus oryzae glucoamylase (Agric. Biol. Chem. (1991), 55 (4), p. 941-949), or variants or fragments thereof. Other Aspergillus glucoamylase variants include variants with enhanced thermal stability: G137A and G139A (Chen et al. (1996), Prot. Eng. 9, 499-505); D257E and D293E/Q (Chen et al. (1995), Prot. Eng. 8, 575-582); N182 (Chen et al. (1994), Biochem. J. 301, 275-281); disulphide bonds, A246C (Fierobe et al. (1996), Biochemistry, 35, 8698-8704; and introduction of Pro residues in position A435 and S436 (Li et al. (1997), Protein Eng. 10, 1199-1204.

[0268] Other glucoamylases include Athelia rolfsii (previously denoted Corticium rolfsii) glucoamylase (see U.S. Pat. No. 4,727,026 and (Nagasaka et al. (1998) “Purification and properties of the raw-starch-degrading glucoamylases from Corticium rolfsii, Appl Microbiol Biotechnol 50:323-330), Talaromyces glucoamylases, in particular derived from Talaromyces emersonii (WO 99/28448), Talaromyces leycettanus (U.S. Pat. No. Re. 32,153), Talaromyces duponti, Talaromyces thermophilus (U.S. Pat. No. 4,587,215). In one embodiment, the glucoamylase used during saccharification and/or fermentation is the Talaromyces emersonii glucoamylase disclosed in WO 99/28448 or the Talaromyces emersonii glucoamylase of SEQ ID NO: 247.

[0269] Bacterial glucoamylases contemplated include glucoamylases from the genus Clostridium, in particular C. thermoamylolyticum (EP 135,138), and C. thermohydrosulfuricum (WO 86/01831).

[0270] Contemplated fungal glucoamylases include Trametes cingulate, Pachykytospora papyracea; and Leucopaxillus giganteus all disclosed in WO2006/069289; or Peniophora rufomarginata disclosed in WO2007/124285; or a mixture thereof. Also hybrid glucoamylase are contemplated. Examples include the hybrid glucoamylases disclosed in WO2005/045018.

[0271] In one embodiment, the glucoamylase is derived from a strain of the genus Pycnoporus, in particular a strain of Pycnoporus as described in WO2011/066576 (SEQ ID NO: 2, 4 or 6 therein), including the Pycnoporus sanguineus glucoamylase, or from a strain of the genus Gloeophyllum, such as a strain of Gloeophyllum sepiarium or Gloeophyllum trabeum, in particular a strain of Gloeophyllum as described in WO 2011/068803 (SEQ ID NO: 2, 4, 6, 8, 10, 12, 14 or 16 therein). In one embodiment, the glucoamylase is SEQ ID NO: 2 in WO2011/068803 (i.e. Gloeophyllum sepiarium glucoamylase). In one embodiment, the glucoamylase is the Gloeophyllum sepiarium glucoamylase of SEQ ID NO: 8. In one embodiment, the glucoamylase is the Pycnoporus sanguineus glucoamylase of SEQ ID NO: 229.

[0272] In one embodiment, the glucoamylase is a Gloeophyllum trabeum glucoamylase (disclosed as SEQ ID NO: 3 in WO2014/177546). In another embodiment, the glucoamylase is derived from a strain of the genus Nigrofomes, in particular a strain of Nigrofomes sp. disclosed in WO2012/064351 (disclosed as SEQ ID NO: 2 therein).

[0273] Also contemplated are glucoamylases with a mature polypeptide sequence which exhibit a high identity to any of the above mentioned glucoamylases, i.e., at least 60%, such as at least 70%, at least 75%, at least 80%, at least 85%, at least 90%, at least 95%, at least 96%, at least 97%, at least 98%, at least 99% or even 100% identity to any one of the mature polypeptide sequences mentioned above.

[0274] Glucoamylases may be added to the saccharification and/or fermentation in an amount of 0.0001-20 AGU/g DS, such as 0.001-10 AGU/g DS, 0.01-5 AGU/g DS, or 0.1-2 AGU/g DS.

[0275] Glucoamylases may be added to the saccharification and/or fermentation in an amount of 1-1,000 μg EP/g DS, such as 10-500 μg/gDS, or 25-250 μg/g DS.

[0276] Glucoamylases may be added to liquefaction in an amount of 0.1-100 μg EP/g DS, such as 0.5-50 μg EP/g DS, 1-25 μg EP/g DS, or 2-12 μg EP/g DS.

[0277] In one embodiment, the glucoamylase is added as a blend further comprising an alpha-amylase (e.g., any alpha-amylase described herein). In one embodiment, the alpha-amylase is a fungal alpha-amylase, especially an acid fungal alpha-amylase. The alpha-amylase is typically a side activity.

[0278] In one embodiment, the glucoamylase is a blend comprising Talaromyces emersonii glucoamylase disclosed in WO 99/28448 as SEQ ID NO: 34 and Trametes cingulata glucoamylase disclosed as SEQ ID NO: 2 in WO06/069289.

[0279] In one embodiment, the glucoamylase is a blend comprising Talaromyces emersonii glucoamylase disclosed in WO 99/28448, Trametes cingulata glucoamylase disclosed as SEQ ID NO: 2 in WO06/69289, and an alpha-amylase.

[0280] In one embodiment, the glucoamylase is a blend comprising Talaromyces emersonii glucoamylase disclosed in WO99/28448, Trametes cingulata glucoamylase disclosed in WO 06/69289, and Rhizomucor pusillus alpha-amylase with Aspergillus nigerglucoamylase linker and SBD disclosed as V039 in Table 5 in WO2006/069290.

[0281] In one embodiment, the glucoamylase is a blend comprising Gloeophyllum sepiarium glucoamylase shown as SEQ ID NO: 2 in WO2011/068803 and an alpha-amylase, in particular Rhizomucor pusillus alpha-amylase with an Aspergillus niger glucoamylase linker and starch-binding domain (SBD), disclosed SEQ ID NO: 3 in WO2013/006756, in particular with the following substitutions: G128D+D143N.

[0282] In one embodiment, the alpha-amylase may be derived from a strain of the genus Rhizomucor, preferably a strain the Rhizomucor pusillus, such as the one shown in SEQ ID NO: 3 in WO2013/006756, or the genus Meripilus, preferably a strain of Meripilus giganteus. In one embodiment, the alpha-amylase is derived from a Rhizomucor pusillus with an Aspergillus niger glucoamylase linker and starch-binding domain (SBD), disclosed as V039 in Table 5 in WO2006/069290.

[0283] In one embodiment, the Rhizomucor pusillus alpha-amylase or the Rhizomucor pusillus alpha-amylase with an Aspergillus niger glucoamylase linker and starch-binding domain (SBD) has at least one of the following substitutions or combinations of substitutions: D165M; Y141W; Y141R; K136F; K192R; P224A; P224R; S123H+Y141W; G20S+Y141W; A76G+Y141W; G128D+Y141W; G128D+D143N; P219C+Y141W; N142D+D143N; Y141W+K192R; Y141W+D143N; Y141W+N383R; Y141W+P219C+A265C; Y141W+N142D+D143N; Y141W+K192R V410A; G128D+Y141W+D143N; Y141W+D143N+P219C; Y141W+D143N+K192R; G128D+D143N+K192R; Y141W+D143N+K192R+P219C; and G128D+Y141W+D143N+K192R; or G128D+Y141W+D143N+K192R+P219C (using SEQ ID NO: 3 in WO 2013/006756 for numbering).

[0284] In one embodiment, the glucoamylase blend comprises Gloeophyllum sepiarium glucoamylase (e.g., SEQ ID NO: 2 in WO2011/068803) and Rhizomucor pusillus alpha-amylase.

[0285] In one embodiment, the glucoamylase blend comprises Gloeophyllum sepiarium glucoamylase shown as SEQ ID NO: 2 in WO2011/068803 and Rhizomucor pusillus with an Aspergillus nigerglucoamylase linker and starch-binding domain (SBD), disclosed SEQ ID NO: 3 in WO2013/006756 with the following substitutions: G128D+D143N.

[0286] Commercially available compositions comprising glucoamylase include AMG 200L; AMG 300 L; SAN™ SUPER, SAN™ EXTRA L, SPIRIZYME® PLUS, SPIRIZYME® FUEL, SPIRIZYME® B4U, SPIRIZYME® ULTRA, SPIRIZYME® EXCEL, SPIRIZYME ACHIEVE®, and AMG® E (from Novozymes A/S); OPTIDEX™ 300, GC480, GC417 (from DuPont-Danisco); AMIGASE™ and AMIGASE™ PLUS (from DSM); G-ZYME™ G900, G-ZYME™ and G990 ZR (from DuPont-Danisco).

[0287] In one embodiment, the glucoamylase is derived from the Debaryomyces occidentalis glucoamylase of SEQ ID NO: 102. In one embodiment, the glucoamylase is derived from the Saccharomycopsis fibuligera glucoamylase of SEQ ID NO: 103. In one embodiment, the glucoamylase is derived from the Saccharomycopsis fibuligera glucoamylase of SEQ ID NO: 104.

[0288] In one embodiment, the glucoamylase is derived from the Saccharomyces cerevisiae glucoamylase of SEQ ID NO: 105. In one embodiment, the glucoamylase is derived from the Aspergillus niger glucoamylase of SEQ ID NO: 106. In one embodiment, the glucoamylase is derived from the Aspergillus oryzae glucoamylase of SEQ ID NO: 107. In one embodiment, the glucoamylase is derived from the Rhizopus oryzae glucoamylase of SEQ ID NO: 108 or SEQ ID NO: 250. In one embodiment, the glucoamylase is derived from the Clostridium thermocellum glucoamylase of SEQ ID NO: 109. In one embodiment, the glucoamylase is derived from the Clostridium thermocellum glucoamylase of SEQ ID NO: 110. In one embodiment, the glucoamylase is derived from the Arxula adeninivorans glucoamylase of SEQ ID NO: 111. In one embodiment, the glucoamylase is derived from the Hormoconis resinae glucoamylase of SEQ ID NO: 112. In one embodiment, the glucoamylase is derived from the Aureobasidium pullulans glucoamylase of SEQ ID NO: 113. In one embodiment, the glucoamylase is derived from the Rhizopus microsporus glucoamylase of SEQ ID NO: 248. In one embodiment, the glucoamylase is derived from the Rhizopus delemar glucoamylase of SEQ ID NO: 249. In one embodiment, the glucoamylase is derived from the Punctularia strigosozonata glucoamylase of SEQ ID NO: 244. In one embodiment, the glucoamylase is derived from the Fibroporia radiculosa glucoamylase of SEQ ID NO: 245. In one embodiment, the glucoamylase is derived from the Wolfiporia cocos glucoamylase of SEQ ID NO: 246.

[0289] In one embodiment, the glucoamylase is a Trichoderma reesei glucoamylase, such as the Trichoderma reesei glucoamylase of SEQ ID NO: 230.

[0290] In one embodiment, the glucoamylase has a Relative Activity heat stability at 85° C. of at least 20%, at least 30%, or at least 35% determined as described in Example 4 of WO2018/098381 (heat stability).

[0291] In one embodiment, the glucoamylase has a relative activity pH optimum at pH 5.0 of at least 90%, e.g., at least 95%, at least 97%, or 100% determined as described in Example 4 of WO2018/098381 (pH optimum).

[0292] In one embodiment, the glucoamylase has a pH stability at pH 5.0 of at least 80%, at least 85%, at least 90% determined as described in Example 4 of WO2018/098381 (pH stability).

[0293] In one embodiment, the glucoamylase used in liquefaction, such as a Penicillium oxalicum glucoamylase variant, has a thermostability determined as DSC Td at pH 4.0 as described in Example 15 of WO2018/098381 of at least 70° C., preferably at least 75° C., such as at least 80° C., such as at least 81° C., such as at least 82° C., such as at least 83° C., such as at least 84° C., such as at least 85° C., such as at least 86° C., such as at least 87%, such as at least 88° C., such as at least 89° C., such as at least 90° C. In one embodiment, the glucoamylase, such as a Penicillium oxalicum glucoamylase variant, has a thermostability determined as DSC Td at pH 4.0 as described in Example 15 of WO2018/098381 in the range between 70° C. and 95° C., such as between 80° C. and 90° C.

[0294] In one embodiment, the glucoamylase, such as a Penicillium oxalicum glucoamylase variant, used in liquefaction has a thermostability determined as DSC Td at pH 4.8 as described in Example 15 of WO2018/098381 of at least 70° C., preferably at least 75° C., such as at least 80° C., such as at least 81° C., such as at least 82° C., such as at least 83° C., such as at least 84° C., such as at least 85° C., such as at least 86° C., such as at least 87%, such as at least 88° C., such as at least 89° C., such as at least 90° C., such as at least 91° C. In one embodiment, the glucoamylase, such as a Penicillium oxalicum glucoamylase variant, has a thermostability determined as DSC Td at pH 4.8 as described in Example 15 of WO2018/098381 in the range between 70° C. and 95° C., such as between 80° C. and 90° C.

[0295] In one embodiment, the glucoamylase, such as a Penicillium oxalicum glucoamylase variant, used in liquefaction has a residual activity determined as described in Example 16 of WO2018/098381, of at least 100% such as at least 105%, such as at least 110%, such as at least 115%, such as at least 120%, such as at least 125%. In one embodiment, the glucoamylase, such as a Penicillium oxalicum glucoamylase variant, has a thermostability determined as residual activity as described in Example 16 of WO2018/098381, in the range between 100% and 130%.

[0296] In one embodiment, the glucoamylase, e.g., of fungal origin such as a filamentous fungi, from a strain of the genus Penicillium, e.g., a strain of Penicillium oxalicum, in particular the Penicillium oxalicum glucoamylase disclosed as SEQ ID NO: 2 in WO2011/127802 (which is hereby incorporated by reference).

[0297] In one embodiment, the glucoamylase has a mature polypeptide sequence of at least 80%, e.g., at least 85%, at least 90%, at least 91%, at least 92%, at least 93%, at least 94%, at least 95%, at least 96%, at least 97%, at least 98%, at least 99% or 100% identity to the mature polypeptide shown in SEQ ID NO: 2 in WO2011/127802.

[0298] In one embodiment, the glucoamylase is a variant of the Penicillium oxalicum glucoamylase disclosed as SEQ ID NO: 2 in WO2011/127802, having a K79V substitution. The K79V glucoamylase variant has reduced sensitivity to protease degradation relative to the parent as disclosed in WO2013/036526 (which is hereby incorporated by reference).

[0299] In one embodiment, the glucoamylase is derived from Penicillium oxalicum.

[0300] In one embodiment, the glucoamylase is a variant of the Penicillium oxalicum glucoamylase disclosed as SEQ ID NO: 2 in WO2011/127802. In one embodiment, the Penicillium oxalicum glucoamylase is the one disclosed as SEQ ID NO: 2 in WO2011/127802 having Val (V) in position 79.

[0301] Contemplated Penicillium oxalicum glucoamylase variants are disclosed in WO 2013/053801 which is hereby incorporated by reference.

[0302] In one embodiment, these variants have reduced sensitivity to protease degradation.

[0303] In one embodiment, these variants have improved thermostability compared to the parent.

[0304] In one embodiment, the glucoamylase has a K79V substitution (using SEQ ID NO: 2 of WO2011/127802 for numbering), corresponding to the PE001 variant, and further comprises one of the following alterations or combinations of alterations
[0305] T65A; Q327F; E501V; Y504T; Y504*; T65A+Q327F; T65A+E501V; T65A+Y504T; T65A+Y504*; Q327F+E501V; Q327F+Y504T; Q327F+Y504*; E501V+Y504T; E501V+Y504*; T65A+Q327F+E501V; T65A+Q327F+Y504T; T65A+E501V+Y504T; Q327F+E501V+Y504T; T65A+Q327F+Y504*; T65A+E501V+Y504*; Q327F+E501V+Y504*; T65A+Q327F+E501V+Y504T; T65A+Q327F+E501V+Y504*; E501V+Y504T; T65A+K161S; T65A+Q405T; T65A+Q327W; T65A+Q327F; T65A+Q327Y; P11F+T65A+Q327F; R1K+D3W+K5Q+G7V+N8S+T10K+P11S+T65A+Q327F; P2N+P4S+P11F+T65A+Q327F; P11F+D26C+K33C+T65A+Q327F; P2N+P4S+P11F+T65A+Q327W+E501V+Y504T; R1E+D3N+P4G+G6R+G7A+N8A+T10D+P11D+T65A+Q327F; P11F+T65A+Q327W; P2N+P4S+P11F+T65A+Q327F+E501V+Y504T; P11F+T65A+Q327W+E501V+Y504T; T65A+Q327F+E501V+Y504T; T65A+S105P+Q327W; T65A+S105P+Q327F; T65A+Q327W+S364P; T65A+Q327F+S364P; T65A+S103N+Q327F; P2N+P4S+P11F+K34Y+T65A+Q327F; P2N+P4S+P11F+T65A+Q327F+D445N+V447S; P2N+P4S+P11F+T65A+I172V+Q327F; P2N+P4S+P11F+T65A+Q327F+N502*; P2N+P4S+P11F+T65A+Q327F+N502T+P563S+K571E; P2N+P4S+P11F+R31S+K33V+T65A+Q327F+N564D+K571S; P2N+P4S+P11F+T65A+Q327F+S377T; P2N+P4S+P11F+T65A+V325T+Q327W; P2N+P4S+P11F+T65A+Q327F+D445N+V447S+E501V+Y504T; P2N+P4S+P11F+T65A+I172V+Q327F+E501V+Y504T; P2N+P4S+P11F+T65A+Q327F+S377T+E501V+Y504T; P2N+P4S+P11F+D26N+K34Y+T65A+Q327F; P2N+P4S+P11F+T65A+Q327F+I375A+E501V+Y504T; P2N+P4S+P11F+T65A+K218A+K221D+Q327F+E501V+Y504T; P2N+P4S+P11F+T65A+S103N+Q327F+E501V+Y504T; P2N+P4S+T10D+T65A+Q327F+E501V+Y504T; P2N+P4S+F12Y+T65A+Q327F+E501V+Y504T; K5A+P11F+T65A+Q327F+E501V+Y504T; P2N+P4S+T10E+E18N+T65A+Q327F+E501V+Y504T; P2N+T10E+E18N+T65A+Q327F+E501V+Y504T; P2N+P4S+P11F+T65A+Q327F+E501V+Y504T+T568N; P2N+P4S+P11F+T65A+Q327F+E501V+Y504T+K524T+G526A; P2N+P4S+P11F+K34Y+T65A+Q327F+D445N+V447S+E501V+Y504T; P2N+P4S+P11F+R31S+K33V+T65A+Q327F+D445N+V447S+E501V+Y504T; P2N+P4S+P11F+D26N+K34Y+T65A+Q327F+E501V+Y504T; P2N+P4S+P11F+T65A+F80*+Q327F+E501V+Y504T; P2N+P4S+P11F+T65A+K112S+Q327F+E501V+Y504T; P2N+P4S+P11F+T65A+Q327F+E501V+Y504T+T516P+K524T+G526A; P2N+P4S+P11F+T65A+Q327F+E501V+N502T+Y504*; P2N+P4S+P11F+T65A+Q327F+E501V+Y504T; P2N+P4S+P11F+T65A+S103N+Q327F+E501V+Y504T; K5A+P11F+T65A+Q327F+E501V+Y504T; P2N+P4S+P11F+T65A+Q327F+E501V+Y504T+T516P+K524T+G526A; P2N+P4S+P11F+T65A+V79A+Q327F+E501V+Y504T; P2N+P4S+P11F+T65A+V79G+Q327F+E501V+Y504T; P2N+P4S+P11F+T65A+V79I+Q327F+E501V+Y504T; P2N+P4S+P11F+T65A+V79L+Q327F+E501V+Y504T; P2N+P4S+P11F+T65A+V79S+Q327F+E501V+Y504T; P2N+P4S+P11F+T65A+L72V+Q327F+E501V+Y504T; S255N+Q327F+E501V+Y504T; P2N+P4S+P11F+T65A+E74N+V79K+Q327F+E501V+Y504T; P2N+P4S+P11F+T65A+G220N+Q327F+E501V+Y504T; P2N+P4S+P11F+T65A+Y245N+Q327F+E501V+Y504T; P2N+P4S+P11F+T65A+Q253N+Q327F+E501V+Y504T; P2N+P4S+P11F+T65A+D279N+Q327F+E501V+Y504T; P2N+P4S+P11F+T65A+Q327F+S359N+E501V+Y504T; P2N+P4S+P11F+T65A+Q327F+D370N+E501V+Y504T; P2N+P4S+P11F+T65A+Q327F+V460S+E501V+Y504T; P2N+P4S+P11F+T65A+Q327F+V460T+P468T+E501V+Y504T; P2N+P4S+P11F+T65A+Q327F+T463N+E501V+Y504T; P2N+P4S+P11F+T65A+Q327F+S465N+E501V+Y504T; and P2N+P4S+P11F+T65A+Q327F+T477N+E501V+Y504T.

[0306] In one embodiment, the Penicillium oxalicum glucoamylase variant has a K79V substitution (using SEQ ID NO: 2 of WO2011/127802 for numbering), corresponding to the PE001 variant, and further comprises one of the following substitutions or combinations of substitutions:
[0307] P11F+T65A+Q327F;
[0308] P2N+P4S+P11F+T65A+Q327F;
[0309] P11F+D26C+K33C+T65A+Q327F;
[0310] P2N+P4S+P11F+T65A+Q327W+E501V+Y504T;
[0311] P2N+P4S+P11F+T65A+Q327F+E501V+Y504T; and
[0312] P11F+T65A+Q327W+E501V+Y504T.

[0313] Additional glucoamylases contemplated for use with the present invention can be found in WO2011/153516 (the content of which is incorporated herein).

[0314] Additional polynucleotides encoding suitable glucoamylases may be obtained from microorganisms of any genus, including those readily available within the UniProtKB database.

[0315] The glucoamylase coding sequences can also be used to design nucleic acid probes to identify and clone DNA encoding glucoamylases from strains of different genera or species, as described supra.

[0316] The polynucleotides encoding glucoamylases may also be identified and obtained from other sources including microorganisms isolated from nature (e.g., soil, composts, water, etc.) or DNA samples obtained directly from natural materials (e.g., soil, composts, water, etc,) as described supra.

[0317] Techniques used to isolate or clone polynucleotides encoding glucoamylases are described supra.

[0318] In one embodiment, the glucoamylase has a mature polypeptide sequence that comprises or consists of the amino acid sequence of any one of the glucoamylases described or referenced herein (e.g., any one of SEQ ID NOs: 8, 102-113, 229, 230 and 244-250). In another embodiment, the glucoamylase has a mature polypeptide sequence that is a fragment of the any one of the glucoamylases described or referenced herein (e.g., any one of SEQ ID NOs: 8, 102-113, 229, 230 and 244-250). In one embodiment, the number of amino acid residues in the fragment is at least 75%, e.g., at least 80%, 85%, 90%, or 95% of the number of amino acid residues in referenced full length glucoamylase (e.g. any one of SEQ ID NOs: 8, 102-113, 229, 230 and 244-250). In other embodiments, the glucoamylase may comprise the catalytic domain of any glucoamylase described or referenced herein (e.g., the catalytic domain of any one of SEQ ID NOs: 8, 102-113, 229, 230 and 244-250).

[0319] The glucoamylase may be a variant of any one of the glucoamylases described supra (e.g., any one of SEQ ID NOs: 8, 102-113, 229, 230 and 244-250). In one embodiment, the glucoamylase has a mature polypeptide sequence of at least 60%, e.g., at least 65%, 70%, 75%, 80%, 85%, 90%, 95%, 97%, 98%, 99%, or 100% sequence identity to any one of the glucoamylases described supra (e.g., any one of SEQ ID NOs: 8, 102-113, 229, 230 and 244-250).

[0320] Examples of suitable amino acid changes, such as conservative substitutions that do not significantly affect the folding and/or activity of the glucoamylase, are described herein.

[0321] In one embodiment, the glucoamylase has a mature polypeptide sequence that differs by no more than ten amino acids, e.g., by no more than five amino acids, by no more than four amino acids, by no more than three amino acids, by no more than two amino acids, or by one amino acid from the amino acid sequence of any one of the glucoamylases described supra (e.g., any one of SEQ ID NOs: 8, 102-113, 229, 230 and 244-250). In one embodiment, the glucoamylase has an amino acid substitution, deletion, and/or insertion of one or more (e.g., two, several) of amino acid sequence of any one of the glucoamylases described supra (e.g., any one of SEQ ID NOs: 8, 102-113, 229, 230 and 244-250). In some embodiments, the total number of amino acid substitutions, deletions and/or insertions is not more than 10, e.g., not more than 9, 8, 7, 6, 5, 4, 3, 2, or 1.

[0322] In some embodiments, the glucoamylase has at least 20%, e.g., at least 40%, at least 50%, at least 60%, at least 70%, at least 80%, at least 90%, at least 95%, at least 96%, at least 97%, at least 98%, at least 99%, or 100% of the glucoamylase activity of any glucoamylase described or referenced herein (e.g., any one of SEQ ID NOs: 8, 102-113, 229, 230 and 244-250) under the same conditions.

[0323] In one embodiment, the glucoamylase coding sequence hybridizes under at least low stringency conditions, e.g., medium stringency conditions, medium-high stringency conditions, high stringency conditions, or very high stringency conditions with the full-length complementary strand of the coding sequence from any glucoamylase described or referenced herein (e.g., any one of SEQ ID NOs: 8, 102-113, 229, 230 and 244-250). In one embodiment, the glucoamylase coding sequence has at least 65%, e.g., at least 70%, at least 75%, at least 80%, at least 85%, at least 85%, at least 90%, at least 91%, at least 92%, at least 93%, at least 94%, at least 95%, at least 96%, at least 97%, at least 98%, at least 99%, or 100% sequence identity with the coding sequence from any glucoamylase described or referenced herein (e.g., any one of SEQ ID NOs: 8, 102-113, 229, 230 and 244-250).

[0324] In one embodiment, the glucoamylase comprises the coding sequence of any glucoamylase described or referenced herein (any one of SEQ ID NOs: 8, 102-113, 229, 230 and 244-250). In one embodiment, the glucoamylase comprises a coding sequence that is a subsequence of the coding sequence from any glucoamylase described or referenced herein, wherein the subsequence encodes a polypeptide having glucoamylase activity. In one embodiment, the number of nucleotides residues in the subsequence is at least 75%, e.g., at least 80%, 85%, 90%, or 95% of the number of the referenced coding sequence.

[0325] The referenced glucoamylase coding sequence of any related aspect or embodiment described herein can be the native coding sequence or a degenerate sequence, such as a codon-optimized coding sequence designed for use in a particular host cell (e.g., optimized for expression in Saccharomyces cerevisiae).

[0326] The glucoamylase can also include fused polypeptides or cleavable fusion polypeptides, as described supra.

### Alpha-Amylases

[0327] The host cells and fermenting organisms may express a heterologous alpha-amylase. The alpha-amylase may be any alpha-amylase that is suitable for the host cells and/or the methods described herein, such as a naturally occurring alpha-amylase (e.g., a native alpha-amylase from another species or an endogenous alpha-amylase expressed from a modified expression vector) or a variant thereof that retains alpha-amylase activity. Any alpha-amylase contemplated for expression by a host cell or fermenting organism described below is also contemplated for embodiments of the invention involving exogenous addition of an alpha-amylase.

[0328] In some embodiments, the host cell or fermenting organism comprises a heterologous polynucleotide encoding an alpha-amylase, for example, as described in WO2017/087330 or WO2020/023411, the content of which is hereby incorporated by reference. Any alpha-amylase described or referenced herein is contemplated for expression in the host cell or fermenting organism.

[0329] In some embodiments, the host cell or fermenting organism comprising a heterologous polynucleotide encoding an alpha-amylase has an increased level of alpha-amylase activity compared to the host cells without the heterologous polynucleotide encoding the alpha-amylase, when cultivated under the same conditions. In some embodiments, the host cell or fermenting organism has an increased level of alpha-amylase activity of at least 5%, e.g., at least 10%, at least 15%, at least 20%, at least 25%, at least 50%, at least 100%, at least 150%, at least 200%, at least 300%, or at 500% compared to the host cell or fermenting organism without the heterologous polynucleotide encoding the alpha-amylase, when cultivated under the same conditions (e.g., as described in Example 2).

[0330] Exemplary alpha-amylases that can be used with the host cells and/or the methods described herein include bacterial, yeast, or filamentous fungal alpha-amylases, e.g., derived from any of the microorganisms described or referenced herein.

[0331] The term “bacterial alpha-amylase” means any bacterial alpha-amylase classified under EC 3.2.1.1. A bacterial alpha-amylase used herein may, e.g., be derived from a strain of the genus Bacillus, which is sometimes also referred to as the genus Geobacillus. In one embodiment, the Bacillus alpha-amylase is derived from a strain of Bacillus amyloliquefaciens, Bacillus licheniformis, Bacillus stearothermophilus, or Bacillus subtilis, but may also be derived from other Bacillus sp.

[0332] Specific examples of bacterial alpha-amylases include the Bacillus stearothermophilus alpha-amylase (BSG) of SEQ ID NO: 3 in WO99/19467, the Bacillus amyloliquefaciens alpha-amylase (BAN) of SEQ ID NO: 5 in WO99/19467, and the Bacillus licheniformis alpha-amylase (BLA) of SEQ ID NO: 4 in WO99/19467 (all sequences are hereby incorporated by reference). In one embodiment, the alpha-amylase may be an enzyme having a mature polypeptide sequence with a degree of identity of at least 60%, e.g., at least 70%, at least 80%, at least 90%, at least 95%, at least 96%, at least 97%, at least 98% or at least 99% to any of the sequences shown in SEQ ID NOs: 3, 4 or 5, in WO99/19467.

[0333] In one embodiment, the alpha-amylase is derived from Bacillus stearothermophilus. The Bacillus stearothermophilus alpha-amylase may be a mature wild-type or a mature variant thereof.

[0334] The mature Bacillus stearothermophilus alpha-amylases may naturally be truncated during recombinant production. For instance, the Bacillus stearothermophilus alpha-amylase may be a truncated at the C-terminal, so that it is from 480-495 amino acids long, such as about 491 amino acids long, e.g., so that it lacks a functional starch binding domain (compared to SEQ ID NO: 3 in WO99/19467).

[0335] The Bacillus alpha-amylase may also be a variant and/or hybrid. Examples of such a variant can be found in any of WO96/23873, WO96/23874, WO97/41213, WO99/19467, WO00/60059, and WO02/10355 (each hereby incorporated by reference). Specific alpha-amylase variants are disclosed in U.S. Pat. Nos. 6,093,562, 6,187,576, 6,297,038, and 7,713,723 (hereby incorporated by reference) and include Bacillus stearothermophilus alpha-amylase (often referred to as BSG alpha-amylase) variants having a deletion of one or two amino acids at positions R179, G180, I181 and/or G182, preferably a double deletion disclosed in WO96/23873—see, e.g., page 20, lines 1-10 (hereby incorporated by reference), such as corresponding to deletion of positions I181 and G182 compared to the amino acid sequence of Bacillus stearothermophilus alpha-amylase set forth in SEQ ID NO: 3 disclosed in WO99/19467 or the deletion of amino acids R179 and G180 using SEQ ID NO: 3 in WO99/19467 for numbering (which reference is hereby incorporated by reference). In some embodiments, the Bacillus alpha-amylases, such as Bacillus stearothermophilus alpha-amylases, have a double deletion corresponding to a deletion of positions 181 and 182 and further optionally comprise a N193F substitution (also denoted I181*+G182*+N193F) compared to the wild-type BSG alpha-amylase amino acid sequence set forth in SEQ ID NO: 3 disclosed in WO 99/19467. The bacterial alpha-amylase may also have a substitution in a position corresponding to S239 in the Bacillus licheniformis alpha-amylase shown in SEQ ID NO: 4 in WO99/19467, or a S242 and/or E188P variant of the Bacillus stearothermophilus alpha-amylase of SEQ ID NO: 3 in WO99/19467.

[0336] In one embodiment, the variant is a S242A, E or Q variant, e.g., a S242Q variant, of the Bacillus stearothermophilus alpha-amylase.

[0337] In one embodiment, the variant is a position E188 variant, e.g., E188P variant of the Bacillus stearothermophilus alpha-amylase.

[0338] The bacterial alpha-amylase may, in one embodiment, be a truncated Bacillus alpha-amylase. In one embodiment, the truncation is so that, e.g., the Bacillus stearothermophilus alpha-amylase shown in SEQ ID NO: 3 in WO99/19467, is about 491 amino acids long, such as from 480 to 495 amino acids long, or so it lacks a functional starch bind domain.

[0339] The bacterial alpha-amylase may also be a hybrid bacterial alpha-amylase, e.g., an alpha-amylase comprising 445 C-terminal amino acid residues of the Bacillus licheniformis alpha-amylase (shown in SEQ ID NO: 4 of WO99/19467) and the 37 N-terminal amino acid residues of the alpha-amylase derived from Bacillus amyloliquefaciens (shown in SEQ ID NO: 5 of WO99/19467). In one embodiment, this hybrid has one or more, especially all, of the following substitutions: G48A+T49I+G107A+H156Y+A181T+N190F+I201F+A209V+Q264S (using the Bacillus licheniformis numbering in SEQ ID NO: 4 of WO 99/19467). In some embodiments, the variants have one or more of the following mutations (or corresponding mutations in other Bacillus alpha-amylases): H154Y, A181T, N190F, A209V and Q264S and/or the deletion of two residues between positions 176 and 179, e.g., deletion of E178 and G179 (using SEQ ID NO: 5 of WO99/19467 for position numbering).

[0340] In one embodiment, the bacterial alpha-amylase is the mature part of the chimeric alpha-amylase disclosed in Richardson et al. (2002), The Journal of Biological Chemistry, Vol. 277, No 29, Issue 19 July, pp. 267501-26507, referred to as BD5088 or a variant thereof. This alpha-amylase is the same as the one shown in SEQ ID NO: 2 in WO2007/134207. The mature enzyme sequence starts after the initial “Met” amino acid in position 1.

[0341] The alpha-amylase may be a thermostable alpha-amylase, such as a thermostable bacterial alpha-amylase, e.g., from Bacillus stearothermophilus. In one embodiment, the alpha-amylase used in a process described herein has a T % (min) at pH 4.5, 85° C., 0.12 mM CaCl₂ of at least 10 determined as described in Example 1 of WO2018/098381.

[0342] In one embodiment, the thermostable alpha-amylase has a T % (min) at pH 4.5, 85° C., 0.12 mM CaCl₂, of at least 15. In one embodiment, the thermostable alpha-amylase has a T % (min) at pH 4.5, 85° C., 0.12 mM CaCl₂, of as at least 20. In one embodiment, the thermostable alpha-amylase has a T % (min) at pH 4.5, 85° C., 0.12 mM CaCl₂, of as at least 25. In one embodiment, the thermostable alpha-amylase has a T % (min) at pH 4.5, 85° C., 0.12 mM CaCl₂, of as at least 30. In one embodiment, the thermostable alpha-amylase has a T % (min) at pH 4.5, 85° C., 0.12 mM CaCl₂, of as at least 40.

[0343] In one embodiment, the thermostable alpha-amylase has a T % (min) at pH 4.5, 85° C., 0.12 mM CaCl₂, of at least 50. In one embodiment, the thermostable alpha-amylase has a T % (min) at pH 4.5, 85° C., 0.12 mM CaCl₂, of at least 60. In one embodiment, the thermostable alpha-amylase has a T % (min) at pH 4.5, 85° C., 0.12 mM CaCl₂, between 10-70. In one embodiment, the thermostable alpha-amylase has a T % (min) at pH 4.5, 85° C., 0.12 mM CaCl₂, between 15-70. In one embodiment, the thermostable alpha-amylase has a T % (min) at pH 4.5, 85° C., 0.12 mM CaCl₂, between 20-70. In one embodiment, the thermostable alpha-amylase has a T % (min) at pH 4.5, 85° C., 0.12 mM CaCl₂, between 25-70. In one embodiment, the thermostable alpha-amylase has a T % (min) at pH 4.5, 85° C., 0.12 mM CaCl₂, between 30-70. In one embodiment, the thermostable alpha-amylase has a T % (min) at pH 4.5, 85° C., 0.12 mM CaCl₂, between 40-70. In one embodiment, the thermostable alpha-amylase has a T % (min) at pH 4.5, 85° C., 0.12 mM CaCl₂, between 50-70. In one embodiment, the thermostable alpha-amylase has a T % (min) at pH 4.5, 85° C., 0.12 mM CaCl₂, between 60-70.

[0344] In one embodiment, the alpha-amylase is a bacterial alpha-amylase, e.g., derived from the genus Bacillus, such as a strain of Bacillus stearothermophilus, e.g., the Bacillus stearothermophilus as disclosed in WO99/019467 as SEQ ID NO: 3 with one or two amino acids deleted at positions R179, G180, I181 and/or G182, in particular with R179 and G180 deleted, or with I181 and G182 deleted, with mutations in below list of mutations.

[0345] In some embodiment, the Bacillus stearothermophilus alpha-amylases have double deletion I181+G182, and optional substitution N193F, further comprising one of the following substitutions or combinations of substitutions:
[0346] V59A+Q89R+G112D+E129V+K177L+R179E+K220P+N224L+Q254S;
[0347] V59A+Q89R+E129V+K177L+R179E+H208Y+K220P+N224L+Q254S;
[0348] V59A+Q89R+E129V+K177L+R179E+K220P+N224L+Q254S+D269E+D281N;
[0349] V59A+Q89R+E129V+K177L+R179E+K220P+N224L+Q254S+I270L;
[0350] V59A+Q89R+E129V+K177L+R179E+K220P+N224L+Q254S+H274K;
[0351] V59A+Q89R+E129V+K177L+R179E+K220P+N224L+Q254S+Y276F;
[0352] V59A+E129V+R157Y+K177L+R179E+K220P+N224L+S242Q+Q254S;
[0353] V59A+E129V+K177L+R179E+H208Y+K220P+N224L+S242Q+Q254S;
[0354] V59A+E129V+K177L+R179E+K220P+N224L+S242Q+Q254S;
[0355] V59A+E129V+K177L+R179E+K220P+N224L+S242Q+Q254S+H274K;
[0356] V59A+E129V+K177L+R179E+K220P+N224L+S242Q+Q254S+Y276F;
[0357] V59A+E129V+K177L+R179E+K220P+N224L+S242Q+Q254S+D281N;
[0358] V59A+E129V+K177L+R179E+K220P+N224L+S242Q+Q254S+M284T;
[0359] V59A+E129V+K177L+R179E+K220P+N224L+S242Q+Q254S+G416V;
[0360] V59A+E129V+K177L+R179E+K220P+N224L+Q254S;
[0361] V59A+E129V+K177L+R179E+K220P+N224L+Q254S+M284T;
[0362] A91L+M96I+E129V+K177L+R179E+K220P+N224L+S242Q+Q254S;
[0363] E129V+K177L+R179E;
[0364] E129V+K177L+R179E+K220P+N224L+S242Q+Q254S;
[0365] E129V+K177L+R179E+K220P+N224L+S242Q+Q254S+Y276F+L427M;
[0366] E129V+K177L+R179E+K220P+N224L+S242Q+Q254S+M284T;
[0367] E129V+K177L+R179E+K220P+N224L+S242Q+Q254S+N376*+I377*;
[0368] E129V+K177L+R179E+K220P+N224L+Q254S;
[0369] E129V+K177L+R179E+K220P+N224L+Q254S+M284T;
[0370] E129V+K177L+R179E+S242Q;
[0371] E129V+K177L+R179V+K220P+N224L+S242Q+Q254S;
[0372] K220P+N224L+S242Q+Q254S;
[0373] M284V;
[0374] V59A+Q89R+E129V+K177L+R179E+Q254S+M284V; and
[0375] V59A+E129V+K177L+R179E+Q254S+M284V;

[0376] In one embodiment, the alpha-amylase is selected from the group of Bacillus stearothermophilus alpha-amylase variants with double deletion I181*+G182*, and optionally substitution N193F, and further one of the following substitutions or combinations of substitutions:
[0377] E129V+K177L+R179E;
[0378] V59A+Q89R+E129V+K177L+R179E+H208Y+K220P+N224L+Q254S;
[0379] V59A+Q89R+E129V+K177L+R179E+Q254S+M284V;
[0380] V59A+E129V+K177L+R179E+Q254S+M284V; and
[0381] E129V+K177L+R179E+K220P+N224L+S242Q+Q254S (using SEQ ID NO: 1 herein for numbering).

[0382] It should be understood that when referring to Bacillus stearothermophilus alpha-amylase and variants thereof they are normally produced in truncated form. In particular, the truncation may be so that the Bacillus stearothermophilus alpha-amylase shown in SEQ ID NO: 3 in WO99/19467, or variants thereof, are truncated in the C-terminal and are typically from 480-495 amino acids long, such as about 491 amino acids long, e.g., so that it lacks a functional starch binding domain.

[0383] In one embodiment, the alpha-amylase variant may be an enzyme having a mature polypeptide sequence with a degree of identity of at least 60%, e.g., at least 70%, at least 80%, at least 90%, at least 95%, at least 91%, at least 92%, at least 93%, at least 94%, at least 95%, at least 96%, at least 97%, at least 98% or at least 99%, but less than 100% to the sequence shown in SEQ ID NO: 3 in WO99/19467.

[0384] In one embodiment, the bacterial alpha-amylase, e.g., Bacillus alpha-amylase, such as especially Bacillus stearothermophilus alpha-amylase, or variant thereof, is dosed to liquefaction in a concentration between 0.01-10 KNU-A/g DS, e.g., between 0.02 and 5 KNU-A/g DS, such as 0.03 and 3 KNU-A, preferably 0.04 and 2 KNU-A/g DS, such as especially 0.01 and 2 KNU-A/g DS. In one embodiment, the bacterial alpha-amylase, e.g., Bacillus alpha-amylase, such as especially Bacillus stearothermophilus alpha-amylases, or variant thereof, is dosed to liquefaction in a concentration of between 0.0001-1 mg EP (Enzyme Protein)/g DS, e.g., 0.0005-0.5 mg EP/g DS, such as 0.001-0.1 mg EP/g DS.

[0385] In one embodiment, the bacterial alpha-amylase is derived from the Bacillus subtilis alpha-amylase of SEQ ID NO: 76, the Bacillus subtilis alpha-amylase of SEQ ID NO: 82, the Bacillus subtilis alpha-amylase of SEQ ID NO: 83, the Bacillus subtilis alpha-amylase of SEQ ID NO: 84, or the Bacillus licheniformis alpha-amylase of SEQ ID NO: 85, the Clostridium phytofermentans alpha-amylase of SEQ ID NO: 89, the Clostridium phytofermentans alpha-amylase of SEQ ID NO: 90, the Clostridium phytofermentans alpha-amylase of SEQ ID NO: 91, the Clostridium phytofermentans alpha-amylase of SEQ ID NO: 92, the Clostridium phytofermentans alpha-amylase of SEQ ID NO: 93, the Clostridium phytofermentans alpha-amylase of SEQ ID NO: 94, the Clostridium thermocellum alpha-amylase of SEQ ID NO: 95, the Thermobifida fusca alpha-amylase of SEQ ID NO: 96, the Thermobifida fusca alpha-amylase of SEQ ID NO: 97, the Anaerocellum thermophilum of SEQ ID NO: 98, the Anaerocellum thermophilum of SEQ ID NO: 99, the Anaerocellum thermophilum of SEQ ID NO: 100, the Streptomyces avermitilis of SEQ ID NO: 101, or the Streptomyces avermitilis of SEQ ID NO: 88.

[0386] In one embodiment, the alpha-amylase is derived from Bacillus amyloliquefaciens, such as the Bacillus amyloliquefaciens alpha-amylase of SEQ ID NO: 231 (e.g., as described in WO2018/002360, or variants thereof as described in WO2017/037614).

[0387] In one embodiment, the alpha-amylase is derived from a yeast alpha-amylase, such as the Saccharomycopsis fibuligera alpha-amylase of SEQ ID NO: 77, the Debaryomyces occidentalis alpha-amylase of SEQ ID NO: 78, the Debaryomyces occidentalis alpha-amylase of SEQ ID NO: 79, the Lipomyces kononenkoae alpha-amylase of SEQ ID NO: 80, the Lipomyces kononenkoae alpha-amylase of SEQ ID NO: 81.

[0388] In one embodiment, the alpha-amylase is derived from a filamentous fungal alpha-amylase, such as the Aspergillus niger alpha-amylase of SEQ ID NO: 86, or the Aspergillus niger alpha-amylase of SEQ ID NO: 87.

[0389] Additional alpha-amylases that may be expressed with the host cells and fermenting organisms and used with the methods described herein are described in the examples, and include, but are not limited to alpha-amylases shown in Table 4 (or derivatives thereof).

TABLE 4

| Donor Organism | SEQ ID NO: |
|---|---|
| (catalytic domain) | (mature polypeptide) |
| Rhizomucor pusillus | 121 |
| Bacillus licheniformis | 122 |
| Aspergillus niger | 123 |
| Aspergillus tamarii | 124 |
| Acidomyces richmondensis | 125 |
| Aspergillus bombycis | 126 |
| Alternaria sp | 127 |
| Rhizopus microsporus | 128 |
| Syncephalastrum racemosum | 129 |
| Rhizomucor pusillus | 130 |
| Dichotomocladium hesseltinei | 131 |
| Lichtheimia ramosa | 132 |
| Penicillium aethiopicum | 133 |
| Subulispora sp | 134 |
| Trichoderma paraviridescens | 135 |
| Byssoascus striatosporus | 136 |
| Aspergillus brasiliensis | 137 |
| Penicillium subspinulosum | 138 |
| Penicillium antarcticum | 139 |
| Penicillium coprophilum | 140 |
| Penicillium olsonii | 141 |
| Penicillium vasconiae | 142 |
| Penicillium sp | 143 |
| Heterocephalum aurantiacum | 144 |
| Neosartorya massa | 145 |
| Penicillium janthinellum | 146 |
| Aspergillus brasiliensis | 147 |
| Aspergillus westerdijkiae | 148 |
| Hamigera avellanea | 149 |
| Hamigera avellanea | 150 |
| Meripilus giganteus | 151 |
| Cerrena unicolor | 152 |
| Physalacria cryptomeriae | 153 |
| Lenzites betulinus | 154 |
| Trametes ljubarskyi | 155 |
| Bacillus subtilis | 156 |
| Bacillus subtilis subsp. subtilis | 157 |
| Schwanniomyces occidentalis | 158 |
| Rhizomucor pusillus | 159 |
| Aspergillus niger | 160 |
| Bacillus stearothermophilus | 161 |
| Bacillus halmapalus | 162 |
| Aspergillus oryzae | 163 |
| Bacillus amyloliquefaciens | 164 |
| Rhizomucor pusillus | 165 |
| Kionochaeta ivoriensis | 166 |
| Aspergillus niger | 167 |
| Aspergillus oryzae | 168 |
| Penicillium canescens | 169 |
| Acidomyces acidothermus | 170 |
| Kinochaeta ivoriensis | 171 |
| Aspergillus terreus | 172 |
| Thamnidium elegans | 173 |
| Meripilus giganteus | 174 |
| Bacillus amyloliquefaciens | 231 |
| Thermococcus gammatolerans | 251 |
| Thermococcus thioreducens | 252 |
| Thermococcus eurythermalis | 253 |
| Thermococcus hydrothermalis | 254 |
| Pyrococcus furiosus | 255 |
| Bacillus amyloliquefaciens | 256 |

[0390] Additional alpha-amylases contemplated for use with the present invention can be found in WO2011/153516, WO2017/087330 and WO2020/023411 (the content of which is incorporated herein).

[0391] Additional polynucleotides encoding suitable alpha-amylases may be obtained from microorganisms of any genus, including those readily available within the UniProtKB database.

[0392] The alpha-amylase coding sequences can also be used to design nucleic acid probes to identify and clone DNA encoding alpha-amylases from strains of different genera or species, as described supra.

[0393] The polynucleotides encoding alpha-amylases may also be identified and obtained from other sources including microorganisms isolated from nature (e.g., soil, composts, water, etc.) or DNA samples obtained directly from natural materials (e.g., soil, composts, water, etc.) as described supra.

[0394] Techniques used to isolate or clone polynucleotides encoding alpha-amylases are described supra.

[0395] In one embodiment, the alpha-amylase has a mature polypeptide sequence that comprises or consists of the amino acid sequence of any one of the alpha-amylases described or referenced herein (e.g., any one of SEQ ID NOs: 76-101, 121-174, 231 and 251-256). In another embodiment, the alpha-amylase has a mature polypeptide sequence that is a fragment of the any one of the alpha-amylases described or referenced herein (e.g., any one of SEQ ID NOs: 76-101, 121-174, 231 and 251-256). In one embodiment, the number of amino acid residues in the fragment is at least 75%, e.g., at least 80%, 85%, 90%, or 95% of the number of amino acid residues in referenced full length alpha-amylase (e.g. any one of SEQ ID NOs: 76-101, 121-174, 231 and 251-256). In other embodiments, the alpha-amylase may comprise the catalytic domain of any alpha-amylase described or referenced herein (e.g., the catalytic domain of any one of SEQ ID NOs: 76-101, 121-174, 231 and 251-256).

[0396] The alpha-amylase may be a variant of any one of the alpha-amylases described supra (e.g., any one of SEQ ID NOs: 76-101, 121-174, 231 and 251-256). In one embodiment, the alpha-amylase has a mature polypeptide sequence of at least 60%, e.g., at least 65%, 70%, 75%, 80%, 85%, 90%, 95%, 97%, 98%, 99%, or 100% sequence identity to any one of the alpha-amylases described supra (e.g., any one of SEQ ID NOs: 76-101, 121-174, 231 and 251-256).

[0397] Examples of suitable amino acid changes, such as conservative substitutions that do not significantly affect the folding and/or activity of the alpha-amylase, are described herein.

[0398] In one embodiment, the alpha-amylase has a mature polypeptide sequence that differs by no more than ten amino acids, e.g., by no more than five amino acids, by no more than four amino acids, by no more than three amino acids, by no more than two amino acids, or by one amino acid from the amino acid sequence of any one of the alpha-amylases described supra (e.g., any one of SEQ ID NOs: 76-101, 121-174, 231 and 251-256). In one embodiment, the alpha-amylase has an amino acid substitution, deletion, and/or insertion of one or more (e.g., two, several) of amino acid sequence of any one of the alpha-amylases described supra (e.g., any one of SEQ ID NOs: 76-101, 121-174, 231 and 251-256). In some embodiments, the total number of amino acid substitutions, deletions and/or insertions is not more than 10, e.g., not more than 9, 8, 7, 6, 5, 4, 3, 2, or 1.

[0399] In some embodiments, the alpha-amylase has at least 20%, e.g., at least 40%, at least 50%, at least 60%, at least 70%, at least 80%, at least 90%, at least 95%, at least 96%, at least 97%, at least 98%, at least 99%, or 100% of the alpha-amylase activity of any alpha-amylase described or referenced herein (e.g., any one of SEQ ID NOs: 76-101, 121-174, 231 and 251-256) under the same conditions.

[0400] In one embodiment, the alpha-amylase coding sequence hybridizes under at least low stringency conditions, e.g., medium stringency conditions, medium-high stringency conditions, high stringency conditions, or very high stringency conditions with the full-length complementary strand of the coding sequence from any alpha-amylase described or referenced herein (e.g., any one of SEQ ID NOs: 76-101, 121-174 and 231). In one embodiment, the alpha-amylase coding sequence has at least 65%, e.g., at least 70%, at least 75%, at least 80%, at least 85%, at least 85%, at least 90%, at least 91%, at least 92%, at least 93%, at least 94%, at least 95%, at least 96%, at least 97%, at least 98%, at least 99%, or 100% sequence identity with the coding sequence from any alpha-amylase described or referenced herein (e.g., any one of SEQ ID NOs: 76-101, 121-174, 231 and 251-256).

[0401] In one embodiment, the alpha-amylase comprises the coding sequence of any alpha-amylase described or referenced herein (any one of SEQ ID NOs: 76-101, 121-174, 231 and 251-256). In one embodiment, the alpha-amylase comprises a coding sequence that is a subsequence of the coding sequence from any alpha-amylase described or referenced herein, wherein the subsequence encodes a polypeptide having alpha-amylase activity. In one embodiment, the number of nucleotides residues in the subsequence is at least 75%, e.g., at least 80%, 85%, 90%, or 95% of the number of the referenced coding sequence.

[0402] The referenced alpha-amylase coding sequence of any related aspect or embodiment described herein can be the native coding sequence or a degenerate sequence, such as a codon-optimized coding sequence designed for use in a particular host cell (e.g., optimized for expression in Saccharomyces cerevisiae).

[0403] The alpha-amylase can also include fused polypeptides or cleavable fusion polypeptides, as described supra.

### Phospholipases

[0404] The host cells and fermenting organisms may express a heterologous phospholipase. The phospholipase may be any phospholipase that is suitable for the host cells, fermenting organism, and/or the methods described herein, such as a naturally occurring phospholipase (e.g., a native phospholipase from another species or an endogenous phospholipase expressed from a modified expression vector) or a variant thereof that retains phospholipase activity. Any phospholipase contemplated for expression by a host cell or fermenting organism described below is also contemplated for embodiments of the invention involving exogenous addition of a phospholipase (e.g., added before, during or after liquefaction and/or saccharification).

[0405] In some embodiments, the host cell or fermenting organism comprises a heterologous polynucleotide encoding a phospholipase, for example, as described in WO2018/075430, the content of which is hereby incorporated by reference. In some embodiments, the phospholipase is classified as a phospholipase A. In other embodiments, the phospholipase is classified as a phospholipase C. Any phospholipase described or referenced herein is contemplated for expression in the host cell or fermenting organism.

[0406] In some embodiments, the host cell or fermenting organism comprising a heterologous polynucleotide encoding a phospholipase has an increased level of phospholipase activity compared to the host cells without the heterologous polynucleotide encoding the phospholipase, when cultivated under the same conditions. In some embodiments, the host cell or fermenting organism has an increased level of phospholipase activity of at least 5%, e.g., at least 10%, at least 15%, at least 20%, at least 25%, at least 50%, at least 100%, at least 150%, at least 200%, at least 300%, or at 500% compared to the host cell or fermenting organism without the heterologous polynucleotide encoding the phospholipase, when cultivated under the same conditions.

[0407] Exemplary phospholipases that can be used with the host cells and/or the methods described herein include bacterial, yeast, or filamentous fungal phospholipases, e.g., derived from any of the microorganisms described or referenced herein.

[0408] Additional phospholipases that may be expressed with the host cells and fermenting organisms, and used with the methods described herein, and include, but are not limited to phospholipases shown in Table 5 (or derivatives thereof).

TABLE 5

| Donor Organism | SEQ ID NO: |
|---|---|
| (catalytic domain) | (mature polypeptide) |
| Thermomyces lanuginosus | 235 |
| Talaromyces leycettanus | 236 |
| Penicillium emersonii | 237 |
| Bacillus thuringiensis | 238 |
| Pseudomonas sp. | 239 |
| Kionochaeta sp. | 240 |
| Mariannaea pinicola | 241 |
| Fictibacillus macauensis | 242 |

[0409] Additional phospholipases contemplated for use with the present invention can be found in WO2018/075430 (the content of which is incorporated herein).

[0410] Additional polynucleotides encoding suitable phospholipases may be obtained from microorganisms of any genus, including those readily available within the UniProtKB database.

[0411] The phospholipase coding sequences can also be used to design nucleic acid probes to identify and clone DNA encoding phospholipases from strains of different genera or species, as described supra.

[0412] The polynucleotides encoding phospholipases may also be identified and obtained from other sources including microorganisms isolated from nature (e.g., soil, composts, water, etc.) or DNA samples obtained directly from natural materials (e.g., soil, composts, water, etc.) as described supra.

[0413] Techniques used to isolate or clone polynucleotides encoding phospholipases are described supra.

[0414] In one embodiment, the phospholipase has a mature polypeptide sequence that comprises or consists of the amino acid sequence of any one of the phospholipases described or referenced herein (e.g., any one of SEQ ID NOs: 235, 236, 237, 238, 239, 240, 241, and 242). In another embodiment, the phospholipase has a mature polypeptide sequence that is a fragment of the any one of the phospholipases described or referenced herein (e.g., any one of SEQ ID NOs: 235, 236, 237, 238, 239, 240, 241, and 242). In one embodiment, the number of amino acid residues in the fragment is at least 75%, e.g., at least 80%, 85%, 90%, or 95% of the number of amino acid residues in referenced full length phospholipase (e.g. any one of SEQ ID NOs: 235, 236, 237, 238, 239, 240, 241, and 242). In other embodiments, the phospholipase may comprise the catalytic domain of any phospholipase described or referenced herein (e.g., the catalytic domain of any one of SEQ ID NOs: 235, 236, 237, 238, 239, 240, 241, and 242).

[0415] The phospholipase may be a variant of any one of the phospholipases described supra (e.g., any one of SEQ ID NOs: SEQ ID NOs: 235, 236, 237, 238, 239, 240, 241, and 242). In one embodiment, the phospholipase has a mature polypeptide sequence of at least 60%, e.g., at least 65%, 70%, 75%, 80%, 85%, 90%, 95%, 97%, 98%, 99%, or 100% sequence identity to any one of the phospholipases described supra (e.g., any one of SEQ ID NOs: 235, 236, 237, 238, 239, 240, 241, and 242).

[0416] Examples of suitable amino acid changes, such as conservative substitutions that do not significantly affect the folding and/or activity of the phospholipase, are described herein.

[0417] In one embodiment, the phospholipase has a mature polypeptide sequence that differs by no more than ten amino acids, e.g., by no more than five amino acids, by no more than four amino acids, by no more than three amino acids, by no more than two amino acids, or by one amino acid from the amino acid sequence of any one of the phospholipases described supra (e.g., any one of SEQ ID NOs: 235, 236, 237, 238, 239, 240, 241, and 242). In one embodiment, the phospholipase has an amino acid substitution, deletion, and/or insertion of one or more (e.g., two, several) of amino acid sequence of any one of the phospholipases described supra (e.g., any one of SEQ ID NOs: 235, 236, 237, 238, 239, 240, 241, and 242). In some embodiments, the total number of amino acid substitutions, deletions and/or insertions is not more than 10, e.g., not more than 9, 8, 7, 6, 5, 4, 3, 2, or 1.

[0418] In some embodiments, the phospholipase has at least 20%, e.g., at least 40%, at least 50%, at least 60%, at least 70%, at least 80%, at least 90%, at least 95%, at least 96%, at least 97%, at least 98%, at least 99%, or 100% of the phospholipase activity of any phospholipase described or referenced herein (e.g., any one of SEQ ID NOs: 235, 236, 237, 238, 239, 240, 241, and 242) under the same conditions.

[0419] In one embodiment, the phospholipase coding sequence hybridizes under at least low stringency conditions, e.g., medium stringency conditions, medium-high stringency conditions, high stringency conditions, or very high stringency conditions with the full-length complementary strand of the coding sequence from any phospholipase described or referenced herein (e.g., a coding sequence for a phospholipase of SEQ ID NO: 235, 236, 237, 238, 239, 240, 241 or 242). In one embodiment, the phospholipase coding sequence has at least 65%, e.g., at least 70%, at least 75%, at least 80%, at least 85%, at least 85%, at least 90%, at least 91%, at least 92%, at least 93%, at least 94%, at least 95%, at least 96%, at least 97%, at least 98%, at least 99%, or 100% sequence identity with the coding sequence from any phospholipase described or referenced herein (e.g., a coding sequence for a phospholipase of SEQ ID NO: 235, 236, 237, 238, 239, 240, 241 or 242).

[0420] In one embodiment, the phospholipase comprises the coding sequence of any phospholipase described or referenced herein (e.g., a coding sequence for a phospholipase of SEQ ID NO: 235, 236, 237, 238, 239, 240, 241 or 242). In one embodiment, the phospholipase comprises a coding sequence that is a subsequence of the coding sequence from any phospholipase described or referenced herein, wherein the subsequence encodes a polypeptide having phospholipase activity. In one embodiment, the number of nucleotides residues in the subsequence is at least 75%, e.g., at least 80%, 85%, 90%, or 95% of the number of the referenced coding sequence.

[0421] The referenced phospholipase coding sequence of any related aspect or embodiment described herein can be the native coding sequence or a degenerate sequence, such as a codon-optimized coding sequence designed for use in a particular host cell (e.g., optimized for expression in Saccharomyces cerevisiae).

[0422] The phospholipase can also include fused polypeptides or cleavable fusion polypeptides, as described supra.

### Trehalases

[0423] The host cells and fermenting organisms may express a heterologous trehalase. The trehalase can be any trehalase that is suitable for the host cells, fermenting organisms and/or their methods of use described herein, such as a naturally occurring trehalase or a variant thereof that retains trehalase activity. Any trehalase contemplated for expression by a host cell or fermenting organism described below is also contemplated for embodiments of the invention involving exogenous addition of a trehalase (e.g., added before, during or after liquefaction and/or saccharification).

[0424] In some embodiments, the host cell or fermenting organism comprising a heterologous polynucleotide encoding a trehalase has an increased level of trehalase activity compared to the host cells without the heterologous polynucleotide encoding the trehalase, when cultivated under the same conditions. In some embodiments, the host cell or fermenting organism has an increased level of trehalase activity of at least 5%, e.g., at least 10%, at least 15%, at least 20%, at least 25%, at least 50%, at least 100%, at least 150%, at least 200%, at least 300%, or at 500% compared to the host cell or fermenting organism without the heterologous polynucleotide encoding the trehalase, when cultivated under the same conditions.

[0425] Trehalases that may be expressed with the host cells and fermenting organisms, and used with the methods described herein include, but are not limited to, trehalases shown in Table 6 (or derivatives thereof).

TABLE 6

| Donor Organism | SEQ ID NO: |
|---|---|
| (catalytic domain) | (mature polypeptide) |
| Chaetomium megalocarpum | 175 |
| Lecanicillium psalliotae | 176 |
| Doratomyces sp | 177 |
| Mucor moelleri | 178 |
| Phialophora cyclaminis | 179 |
| Thielavia arenaria | 180 |
| Thielavia antarctica | 181 |
| Chaetomium sp | 182 |
| Chaetomium nigricolor | 183 |
| Chaetomium jodhpurense | 184 |
| Chaetomium piluliferum | 185 |
| Myceliophthora hinnulea | 186 |
| Chloridium virescens | 187 |
| Gelasinospora cratophora | 188 |
| Acidobacteriaceae bacterium | 189 |
| Acidobacterium capsulatum | 190 |
| Acidovorax wautersii | 191 |
| Xanthomonas arboricola | 192 |
| Kosakonia sacchari | 193 |
| Enterobacter sp | 194 |
| Saitozyma flava | 195 |
| Phaeotremella skinneri | 196 |
| Trichoderma asperellum | 197 |
| Corynascus sepedonium | 198 |
| Myceliophthora thermophila | 199 |
| Trichoderma reesei | 200 |
| Chaetomium virescens | 201 |
| Rhodothermus marinus | 202 |
| Myceliophthora sepedonium | 203 |
| Moelleriella libera | 204 |
| Acremonium dichromosporum | 205 |
| Fusarium sambucinum | 206 |
| Phoma sp | 207 |
| Lentinus similis | 208 |
| Diaporthe nobilis | 209 |
| Solicoccozyma terricola | 210 |
| Dioszegia cryoxerica | 211 |
| Talaromyces funiculosus | 212 |
| Hamigera avellanea | 213 |
| Talaromyces ruber | 214 |
| Trichoderma lixii | 215 |
| Aspergillus cervinus | 216 |
| Rasamsonia brevistipitata | 217 |
| Acremonium curvulum | 218 |
| Talaromyces piceae | 219 |
| Penicillium sp | 220 |
| Talaromyces aurantiacus | 221 |
| Talaromyces pinophilus | 222 |
| Talaromyces leycettanus | 223 |
| Talaromyces variabilis | 224 |
| Aspergillus niger | 225 |
| Trichoderma reesei | 226 |

[0426] Additional polynucleotides encoding suitable trehalases may be derived from microorganisms of any suitable genus, including those readily available within the UniProtKB database.

[0427] The trehalase coding sequences can also be used to design nucleic acid probes to identify and clone DNA encoding trehalases from strains of different genera or species, as described supra.

[0428] The polynucleotides encoding trehalases may also be identified and obtained from other sources including microorganisms isolated from nature (e.g., soil, composts, water, etc.) or DNA samples obtained directly from natural materials (e.g., soil, composts, water, etc.) as described supra.

[0429] Techniques used to isolate or clone polynucleotides encoding trehalases are described supra.

[0430] In one embodiment, the trehalase has a mature polypeptide sequence that comprises or consists of the amino acid sequence of any one of the trehalases described or referenced herein (e.g., any one of SEQ ID NOs: 175-226). In another embodiment, the trehalase has a mature polypeptide sequence that is a fragment of the any one of the trehalases described or referenced herein (e.g., any one of SEQ ID NOs: 175-226). In one embodiment, the number of amino acid residues in the fragment is at least 75%, e.g., at least 80%, 85%, 90%, or 95% of the number of amino acid residues in referenced full length trehalase (e.g. any one of SEQ ID NOs: 175-226). In other embodiments, the trehalase may comprise the catalytic domain of any trehalase described or referenced herein (e.g., the catalytic domain of any one of SEQ ID NOs: 175-226).

[0431] The trehalase may be a variant of any one of the trehalases described supra (e.g., any one of SEQ ID NOs: 175-226). In one embodiment, the trehalase has a mature polypeptide sequence of at least 60%, e.g., at least 65%, 70%, 75%, 80%, 85%, 90%, 95%, 97%, 98%, 99%, or 100% sequence identity to any one of the trehalases described supra (e.g., any one of SEQ ID NOs: 175-226).

[0432] Examples of suitable amino acid changes, such as conservative substitutions that do not significantly affect the folding and/or activity of the trehalase, are described herein.

[0433] In one embodiment, the trehalase has a mature polypeptide sequence that differs by no more than ten amino acids, e.g., by no more than five amino acids, by no more than four amino acids, by no more than three amino acids, by no more than two amino acids, or by one amino acid from the amino acid sequence of any one of the trehalases described supra (e.g., any one of SEQ ID NOs: 175-226). In one embodiment, the trehalase has an amino acid substitution, deletion, and/or insertion of one or more (e.g., two, several) of amino acid sequence of any one of the trehalases described supra (e.g., any one of SEQ ID NOs: 175-226). In some embodiments, the total number of amino acid substitutions, deletions and/or insertions is not more than 10, e.g., not more than 9, 8, 7, 6, 5, 4, 3, 2, or 1.

[0434] In some embodiments, the trehalase has at least 20%, e.g., at least 40%, at least 50%, at least 60%, at least 70%, at least 80%, at least 90%, at least 95%, at least 96%, at least 97%, at least 98%, at least 99%, or 100% of the trehalase activity of any trehalase described or referenced herein (e.g., any one of SEQ ID NOs: 175-226) under the same conditions.

[0435] In one embodiment, the trehalase coding sequence hybridizes under at least low stringency conditions, e.g., medium stringency conditions, medium-high stringency conditions, high stringency conditions, or very high stringency conditions with the full-length complementary strand of the coding sequence from any trehalase described or referenced herein (e.g., any one of SEQ ID NOs: 175-226). In one embodiment, the trehalase coding sequence has at least 65%, e.g., at least 70%, at least 75%, at least 80%, at least 85%, at least 85%, at least 90%, at least 91%, at least 92%, at least 93%, at least 94%, at least 95%, at least 96%, at least 97%, at least 98%, at least 99%, or 100% sequence identity with the coding sequence from any trehalase described or referenced herein (e.g., any one of SEQ ID NOs: 175-226).

[0436] In one embodiment, the trehalase comprises the coding sequence of any trehalase described or referenced herein (any one of SEQ ID NOs: 175-226). In one embodiment, the trehalase comprises a coding sequence that is a subsequence of the coding sequence from any trehalase described or referenced herein, wherein the subsequence encodes a polypeptide having trehalase activity. In one embodiment, the number of nucleotides residues in the subsequence is at least 75%, e.g., at least 80%, 85%, 90%, or 95% of the number of the referenced coding sequence.

[0437] The referenced trehalase coding sequence of any related aspect or embodiment described herein can be the native coding sequence or a degenerate sequence, such as a codon-optimized coding sequence designed for use in a particular host cell (e.g., optimized for expression in Saccharomyces cerevisiae).

[0438] The trehalase can also include fused polypeptides or cleavable fusion polypeptides, as described supra.

### Proteases

[0439] The host cells and fermenting organisms may express a heterologous protease. The protease can be any protease that is suitable for the host cells and fermenting organisms and/or their methods of use described herein, such as a naturally occurring protease or a variant thereof that retains protease activity. Any protease contemplated for expression by a host cell or fermenting organism described below is also contemplated for embodiments of the invention involving exogenous addition of a protease (e.g., added before, during or after liquefaction and/or saccharification).

[0440] Proteases are classified on the basis of their catalytic mechanism into the following groups: Serine proteases (S), Cysteine proteases (C), Aspartic proteases (A), Metallo proteases (M), and Unknown, or as yet unclassified, proteases (U), see Handbook of Proteolytic Enzymes, A. J. Barrett, N. D. Rawlings, J. F. Woessner (eds), Academic Press (1998), in particular the general introduction part.

[0441] Protease activity can be measured using any suitable assay, in which a substrate is employed, that includes peptide bonds relevant for the specificity of the protease in question. Assay-pH and assay-temperature are likewise to be adapted to the protease in question. Examples of assay-pH-values are pH 6, 7, 8, 9, 10, or 11. Examples of assay-temperatures are 30, 35, 37, 40, 45, 50, 55, 60, 65, 70 or 80° C.

[0442] In some embodiments, the host cell or fermenting organism comprising a heterologous polynucleotide encoding a protease has an increased level of protease activity compared to the host cell or fermenting organism without the heterologous polynucleotide encoding the protease, when cultivated under the same conditions. In some embodiments, the host cell or fermenting organism has an increased level of protease activity of at least 5%, e.g., at least 10%, at least 15%, at least 20%, at least 25%, at least 50%, at least 100%, at least 150%, at least 200%, at least 300%, or at 500% compared to the host cell or fermenting organism without the heterologous polynucleotide encoding the protease, when cultivated under the same conditions.

[0443] Exemplary proteases that may be expressed with the host cells and fermenting organisms, and used with the methods described herein include, but are not limited to, proteases shown in Table 7 (or derivatives thereof).

TABLE 7

| Donor Organism | SEQ ID NO: | |
|---|---|---|
| (catalytic domain) | (mature polypeptide) | Family |
| Aspergillus niger | 9 | A1 |
| Trichoderma reesei | 10 | |
| Thermoascus aurantiacus | 11 | M35 |
| Dichomitus squalens | 12 | S53 |
| Nocardiopsis prasina | 13 | S1 |
| Penicillium simplicissimum | 14 | S10 |
| Aspergillus niger | 15 | |
| Meriphilus giganteus | 16 | S53 |
| Lecanicillium sp. WMM742 | 17 | S53 |
| Talaromyces proteolyticus | 18 | S53 |
| Penicillium | 19 | A1A |
| ranomafanaense | | |
| Aspergillus oryzae | 20 | S53 |
| Talaromyces liani | 21 | S10 |
| Thermoascus | 22 | S53 |
| thermophilus | | |
| Pyrococcus furiosus | 23 | |
| Trichoderma reesei | 24 | |
| Rhizomucor miehei | 25 | |
| Lenzites betulinus | 26 | S53 |
| Neolentinus lepideus | 27 | S53 |
| Thermococcus sp. | 28 | S8 |
| Thermococcus sp. | 29 | S8 |
| Thermomyces | 30 | S53 |
| lanuginosus | | |
| Thermococcus | 31 | S53 |
| thioreducens | | |
| Polyporus arcularius | 32 | S53 |
| Ganoderma lucidum | 33 | S53 |
| Ganoderma lucidum | 34 | S53 |
| Ganoderma lucidum | 35 | S53 |
| Trametes sp. AH28-2 | 36 | S53 |
| Cinereomyces lindbladii | 37 | S53 |
| Trametes versicolor O82DDP | 38 | S53 |
| Paecilomyces hepiali | 39 | S53 |
| Isaria tenuipes | 40 | S53 |
| Aspergillus tamarii | 41 | S53 |
| Aspergillus brasiliensis | 42 | S53 |
| Aspergillus iizukae | 43 | S53 |
| Penicillium sp-72364 | 44 | S10 |
| Aspergillus denticulatus | 45 | S10 |
| Hamigera sp. t184-6 | 46 | S10 |
| Penicillium janthinellum | 47 | S10 |
| Penicillium vasconiae | 48 | S10 |
| Hamigera paravellanea | 49 | S10 |
| Talaromyces variabilis | 50 | S10 |
| Penicillium arenicola | 51 | S10 |
| Nocardiopsis kunsanensis | 52 | S1 |
| Streptomyces parvulus | 53 | S1 |
| Saccharopolyspora | 54 | S1 |
| endophytica | | |
| luteus cell wall | 55 | S1 |
| enrichments K | | |
| Saccharothrix | 56 | S1 |
| australiensis | | |
| Nocardiopsis | 57 | S1 |
| baichengensis | | |
| Streptomyces sp. SM15 | 58 | S1 |
| Actinoalloteichus | 59 | S1 |
| spitiensis | | |
| Byssochlamys verrucosa | 60 | M35 |
| Hamigera terricola | 61 | M35 |
| Aspergillus tamarii | 62 | M35 |
| Aspergillus niveus | 63 | M35 |
| Penicillium sclerotiorum | 64 | A1 |
| Penicillium bilaiae | 65 | A1 |
| Penicillium antarcticum | 66 | A1 |
| Penicillium sumatrense | 67 | A1 |
| Trichoderma lixii | 68 | A1 |
| Trichoderma | 69 | A1 |
| brevicompactum | | |
| Penicillium | 70 | A1 |
| cinnamopurpureum | | |
| Bacillus licheniformis | 71 | S8 |
| Bacillus subtilis | 72 | S8 |
| Trametes cf versicol | 73 | S53 |

[0444] Additional polynucleotides encoding suitable proteases may be derived from microorganisms of any suitable genus, including those readily available within the UniProtKB database.

[0445] In one embodiment, the protease is derived from Aspergillus, such as the Aspergillus niger protease of SEQ ID NO: 9, the Aspergillus tamarii protease of SEQ ID NO: 41, or the Aspergillus denticulatus protease of SEQ ID NO: 45. In one embodiment, the protease is derived from Dichomitus, such as the Dichomitus squalens protease of SEQ ID NO: 12. In one embodiment, the protease is derived from Penicillium, such as the Penicillium simplicissimum protease of SEQ ID NO: 14, the Penicillium antarcticum protease of SEQ ID NO: 66, or the Penicillium sumatrense protease of SEQ ID NO: 67. In one embodiment, the protease is derived from Meriphilus, such as the Meriphilus giganteus protease of SEQ ID NO: 16. In one embodiment, the protease is derived from Talaromyces, such as the Talaromyces liani protease of SEQ ID NO: 21. In one embodiment, the protease is derived from Thermoascus, such as the Thermoascus thermophilus protease of SEQ ID NO: 22. In one embodiment, the protease is derived from Ganoderma, such as the Ganoderma lucidum protease of SEQ ID NO: 33. In one embodiment, the protease is derived from Hamigera, such as the Hamigera terricola protease of SEQ ID NO: 61. In one embodiment, the protease is derived from Trichoderma, such as the Trichoderma brevicompactum protease of SEQ ID NO: 69.

[0446] The protease coding sequences can also be used to design nucleic acid probes to identify and clone DNA encoding proteases from strains of different genera or species, as described supra.

[0447] The polynucleotides encoding proteases may also be identified and obtained from other sources including microorganisms isolated from nature (e.g., soil, composts, water, etc.) or DNA samples obtained directly from natural materials (e.g., soil, composts, water, etc.) as described supra.

[0448] Techniques used to isolate or clone polynucleotides encoding proteases are described supra.

[0449] In one embodiment, the protease has a mature polypeptide sequence that comprises or consists of the amino acid sequence of any one of SEQ ID NOs: 9-73 (e.g., any one of SEQ ID NOs: 9, 14, 16, 21, 22, 33, 41, 45, 61, 62, 66, 67, and 69; such as any one of SEQ NOs: 9, 14, 16, and 69). In another embodiment, the protease has a mature polypeptide sequence that is a fragment of the protease of any one of SEQ ID NOs: 9-73 (e.g., wherein the fragment has protease activity). In one embodiment, the number of amino acid residues in the fragment is at least 75%, e.g., at least 80%, 85%, 90%, or 95% of the number of amino acid residues in referenced full length protease (e.g. any one of SEQ ID NOs: 9-73). In other embodiments, the protease may comprise the catalytic domain of any protease described or referenced herein (e.g., the catalytic domain of any one of SEQ ID NOs: 9-73).

[0450] The protease may be a variant of any one of the proteases described supra (e.g., any one of SEQ ID NOs: 9-73. In one embodiment, the protease has a mature polypeptide sequence of at least 60%, e.g., at least 65%, 70%, 75%, 80%, 85%, 90%, 95%, 97%, 98%, 99%, or 100% sequence identity to any one of the proteases described supra (e.g., any one of SEQ ID NOs: 9-73).

[0451] Examples of suitable amino acid changes, such as conservative substitutions that do not significantly affect the folding and/or activity of the protease, are described herein.

[0452] In one embodiment, the protease has a mature polypeptide sequence that differs by no more than ten amino acids, e.g., by no more than five amino acids, by no more than four amino acids, by no more than three amino acids, by no more than two amino acids, or by one amino acid from the amino acid sequence of any one of the proteases described supra (e.g., any one of SEQ ID NOs: 9-73). In one embodiment, the protease has an amino acid substitution, deletion, and/or insertion of one or more (e.g., two, several) of amino acid sequence of any one of the proteases described supra (e.g., any one of SEQ ID NOs: 9-73). In some embodiments, the total number of amino acid substitutions, deletions and/or insertions is not more than 10, e.g., not more than 9, 8, 7, 6, 5, 4, 3, 2, or 1.

[0453] In one embodiment, the protease coding sequence hybridizes under at least low stringency conditions, e.g., medium stringency conditions, medium-high stringency conditions, high stringency conditions, or very high stringency conditions with the full-length complementary strand of the coding sequence from any protease described or referenced herein (e.g., any one of SEQ ID NOs: 9-73). In one embodiment, the protease coding sequence has at least 65%, e.g., at least 70%, at least 75%, at least 80%, at least 85%, at least 85%, at least 90%, at least 91%, at least 92%, at least 93%, at least 94%, at least 95%, at least 96%, at least 97%, at least 98%, at least 99%, or 100% sequence identity with the coding sequence from any protease described or referenced herein (e.g., any one of SEQ ID NOs: 9-73).

[0454] In one embodiment, the protease comprises the coding sequence of any protease described or referenced herein (any one of SEQ ID NOs: 9-73). In one embodiment, the protease comprises a coding sequence that is a subsequence of the coding sequence from any protease described or referenced herein, wherein the subsequence encodes a polypeptide having protease activity. In one embodiment, the number of nucleotides residues in the subsequence is at least 75%, e.g., at least 80%, 85%, 90%, or 95% of the number of the referenced coding sequence.

[0455] The referenced protease coding sequence of any related aspect or embodiment described herein can be the native coding sequence or a degenerate sequence, such as a codon-optimized coding sequence designed for use in a particular host cell (e.g., optimized for expression in Saccharomyces cerevisiae).

[0456] The protease can also include fused polypeptides or cleavable fusion polypeptides, as described supra.

[0457] In one embodiment, the protease used according to a process described herein is a Serine proteases. In one particular embodiment, the protease is a serine protease belonging to the family 53, e.g., an endo-protease, such as S53 protease from Meriphilus giganteus, Dichomitus squalens Trametes versicolor, Polyporus arcularius, Lenzites betulinus, Ganoderma lucidum, Neolentinus lepideus, or Bacillus sp. 19138, in a process for producing ethanol from a starch-containing material, the ethanol yield was improved, when the S53 protease was present/or added during saccharification and/or fermentation of either gelatinized or un-gelatinized starch. In one embodiment, the proteases is selected from: (a) proteases belonging to the EC 3.4.21 enzyme group; and/or (b) proteases belonging to the EC 3.4.14 enzyme group; and/or (c) Serine proteases of the peptidase family S53 that comprises two different types of peptidases: tripeptidyl aminopeptidases (exo-type) and endo-peptidases; as described in 1993, Biochem. J. 290:205-218 and in MEROPS protease database, release, 9.4 (31 Jan. 2011) (www.merops.ac.uk). The database is described in Rawlings, N. D., Barrett, A. J. and Bateman, A., 2010, “MEROPS: the peptidase database”, Nucl. Acids Res. 38: D227-D233.

[0458] For determining whether a given protease is a Serine protease, and a family S53 protease, reference is made to the above Handbook and the principles indicated therein. Such determination can be carried out for all types of proteases, be it naturally occurring or wild-type proteases; or genetically engineered or synthetic proteases.

[0459] Peptidase family S53 contains acid-acting endopeptidases and tripeptidyl-peptidases. The residues of the catalytic triad are Glu, Asp, Ser, and there is an additional acidic residue, Asp, in the oxyanion hole. The order of the residues is Glu, Asp, Asp, Ser. The Ser residue is the nucleophile equivalent to Ser in the Asp, His, Ser triad of subtilisin, and the Glu of the triad is a substitute for the general base, His, in subtilisin.

[0460] The peptidases of the S53 family tend to be most active at acidic pH (unlike the homologous subtilisins), and this can be attributed to the functional importance of carboxylic residues, notably Asp in the oxyanion hole. The amino acid sequences are not closely similar to those in family S8 (i.e. serine endopeptidase subtilisins and homologues), and this, taken together with the quite different active site residues and the resulting lower pH for maximal activity, provides for a substantial difference to that family. Protein folding of the peptidase unit for members of this family resembles that of subtilisin, having the clan type SB.

[0461] In one embodiment, the protease used according to a process described herein is a Cysteine proteases.

[0462] In one embodiment, the protease used according to a process described herein is a Aspartic proteases. Aspartic acid proteases are described in, for example, Hand-book of Proteolytic En-zymes, Edited by A. J. Barrett, N. D. Rawlings and J. F. Woessner, Aca-demic Press, San Diego, 1998, Chapter 270). Suitable examples of aspartic acid protease include, e.g., those disclosed in R. M. Berka et al. Gene, 96, 313 (1990)); (R. M. Berka et al. Gene, 125, 195-198 (1993)); and Gomi et al. Biosci. Biotech. Biochem. 57, 1095-1100 (1993), which are hereby incorporated by reference.

[0463] The protease also may be a metalloprotease, which is defined as a protease selected from the group consisting of:
[0464] (a) proteases belonging to EC 3.4.24 (metalloendopeptidases); preferably EC 3.4.24.39 (acid metallo proteinases);
[0465] (b) metalloproteases belonging to the M group of the above Handbook;
[0466] (c) metalloproteases not yet assigned to clans (designation: Clan MX), or belonging to either one of clans MA, MB, MC, MD, ME, MF, MG, MH (as defined at pp. 989-991 of the above Handbook);
[0467] (d) other families of metalloproteases (as defined at pp. 1448-1452 of the above Handbook);
[0468] (e) metalloproteases with a HEXXH motif;
[0469] (f) metalloproteases with an HEFTH motif;
[0470] (g) metalloproteases belonging to either one of families M3, M26, M27, M32, M34, M35, M36, M41, M43, or M47 (as defined at pp. 1448-1452 of the above Handbook);
[0471] (h) metalloproteases belonging to the M28E family; and
[0472] (i) metalloproteases belonging to family M35 (as defined at pp. 1492-1495 of the above Handbook).

[0473] In other particular embodiments, metalloproteases are hydrolases in which the nucleophilic attack on a peptide bond is mediated by a water molecule, which is activated by a divalent metal cation. Examples of divalent cations are zinc, cobalt or manganese. The metal ion may be held in place by amino acid ligands. The number of ligands may be five, four, three, two, one or zero. In a particular embodiment the number is two or three, preferably three.

[0474] There are no limitations on the origin of the metalloprotease used in a process of the invention. In an embodiment the metalloprotease is classified as EC 3.4.24, preferably EC 3.4.24.39. In one embodiment, the metalloprotease is an acid-stable metalloprotease, e.g., a fungal acid-stable metalloprotease, such as a metalloprotease derived from a strain of the genus Thermoascus, preferably a strain of Thermoascus aurantiacus, especially Thermoascus aurantiacus CGMCC No. 0670 (classified as EC 3.4.24.39). In another embodiment, the metalloprotease is derived from a strain of the genus Aspergillus, preferably a strain of Aspergillus oryzae.

[0475] In one embodiment the metalloprotease has a degree of sequence identity to amino acids −178 to 177, −159 to 177, or preferably amino acids 1 to 177 (the mature polypeptide) of SEQ ID NO: 1 of WO2010/008841 (a Thermoascus aurantiacus metalloprotease) of at least 80%, at least 82%, at least 85%, at least 90%, at least 95%, or at least 97%; and which have metalloprotease activity. In particular embodiments, the metalloprotease consists of an amino acid sequence with a degree of identity to SEQ ID NO: 1 as mentioned above.

[0476] The Thermoascus aurantiacus metalloprotease is a preferred example of a metalloprotease suitable for use in a process of the invention. Another metalloprotease is derived from Aspergillus oryzae and comprises the sequence of SEQ ID NO: 11 disclosed in WO2003/048353, or amino acids −23-353; −23-374; −23-397; 1-353; 1-374; 1-397; 177-353; 177-374; or 177-397 thereof, and SEQ ID NO: 10 disclosed in WO2003/048353.

[0477] Another metalloprotease suitable for use in a process of the invention is the Aspergillus oryzae metalloprotease comprising SEQ ID NO: 5 of WO2010/008841, or a metalloprotease is an isolated polypeptide which has a degree of identity to SEQ ID NO: 5 of at least about 80%, at least 82%, at least 85%, at least 90%, at least 95%, or at least 97%; and which have metalloprotease activity. In particular embodiments, the metalloprotease consists of the amino acid sequence of SEQ ID NO: 5 of WO2010/008841.

[0478] In a particular embodiment, a metalloprotease has an amino acid sequence that differs by forty, thirty-five, thirty, twenty-five, twenty, or by fifteen amino acids from amino acids −178 to 177, −159 to 177, or +1 to 177 of the amino acid sequences of the Thermoascus aurantiacus or Aspergillus oryzae metalloprotease.

[0479] In another embodiment, a metalloprotease has an amino acid sequence that differs by ten, or by nine, or by eight, or by seven, or by six, or by five amino acids from amino acids −178 to 177, −159 to 177, or +1 to 177 of the amino acid sequences of these metalloproteases, e.g., by four, by three, by two, or by one amino acid.

[0480] In particular embodiments, the metalloprotease a) comprises or b) consists of
[0481] i) the amino acid sequence of amino acids −178 to 177, −159 to 177, or +1 to 177 of SEQ ID NO:1 of WO2010/008841;
[0482] ii) the amino acid sequence of amino acids −23-353, −23-374, −23-397, 1-353, 1-374, 1-397, 177-353, 177-374, or 177-397 of SEQ ID NO: 3 of WO2010/008841;
[0483] iii) the amino acid sequence of SEQ ID NO: 5 of WO2010/008841; or allelic variants, or fragments, of the sequences of i), ii), and iii) that have protease activity.

[0484] A fragment of amino acids −178 to 177, −159 to 177, or +1 to 177 of SEQ ID NO: 1 of WO2010/008841 or of amino acids −23-353, −23-374, −23-397, 1-353, 1-374, 1-397, 177-353, 177-374, or 177-397 of SEQ ID NO: 3 of WO2010/008841; is a polypeptide having one or more amino acids deleted from the amino and/or carboxyl terminus of these amino acid sequences. In one embodiment a fragment contains at least 75 amino acid residues, or at least 100 amino acid residues, or at least 125 amino acid residues, or at least 150 amino acid residues, or at least 160 amino acid residues, or at least 165 amino acid residues, or at least 170 amino acid residues, or at least 175 amino acid residues.

[0485] To determine whether a given protease is a metallo protease or not, reference is made to the above “Handbook of Proteolytic Enzymes” and the principles indicated therein. Such determination can be carried out for all types of proteases, be it naturally occurring or wild-type proteases; or genetically engineered or synthetic proteases.

[0486] The protease may be a variant of, e.g., a wild-type protease, having thermostability properties defined herein. In one embodiment, the thermostable protease is a variant of a metallo protease. In one embodiment, the thermostable protease used in a process described herein is of fungal origin, such as a fungal metallo protease, such as a fungal metallo protease derived from a strain of the genus Thermoascus, preferably a strain of Thermoascus aurantiacus, especially Thermoascus aurantiacus CGMCC No. 0670 (classified as EC 3.4.24.39).

[0487] In one embodiment, the thermostable protease is a variant of the mature part of the metallo protease shown in SEQ ID NO: 2 disclosed in WO2003/048353 or the mature part of SEQ ID NO: 1 in WO 2010/008841 further with one of the following substitutions or combinations of substitutions:
[0488] S5*+D79L+S87P+A112P+D142L;
[0489] D79L+S87P+A112P+T124V+D142L;
[0490] S5*+N26R+D79L+S87P+A112P+D142L;
[0491] N26R+T46R+D79L+S87P+A112P+D142L;
[0492] T46R+D79L+S87P+T116V+D142L;
[0493] D79L+P81 R+S87P+A112P+D142L;
[0494] A27K+D79L+S87P+A112P+T124V+D142L;
[0495] D79L+Y82F+S87P+A112P+T124V+D142L;
[0496] D79L+Y82F+S87P+A112P+T124V+D142L;
[0497] D79L+S87P+A112P+T124V+A126V+D142L;
[0498] D79L+S87P+A112P+D142L;
[0499] D79L+Y82F+S87P+A112P+D142L;
[0500] S38T+D79L+S87P+A112P+A126V+D142L;
[0501] D79L+Y82F+S87P+A112P+A126V+D142L;
[0502] A27K+D79L+S87P+A112P+A126V+D142L;
[0503] D79L+S87P+N98C+A112P+G135C+D142L;
[0504] D79L+S87P+A112P+D142L+T141C+M161C;
[0505] S36P+D79L+S87P+A112P+D142L;
[0506] A37P+D79L+S87P+A112P+D142L;
[0507] S49P+D79L+S87P+A112P+D142L;
[0508] S50P+D79L+S87P+A112P+D142L;
[0509] D79L+S87P+D104P+A112P+D142L;
[0510] D79L+Y82F+S87G+A112P+D142L;
[0511] S70V+D79L+Y82F+S87G+Y97W+A112P+D142L;
[0512] D79L+Y82F+S87G+Y97W+D104P+A112P+D142L;
[0513] S70V+D79L+Y82F+S87G+A112P+D142L;
[0514] D79L+Y82F+S87G+D104P+A112P+D142L;
[0515] D79L+Y82F+S87G+A112P+A126V+D142L;
[0516] Y82F+S87G+S70V+D79L+D104P+A112P+D142L;
[0517] Y82F+S87G+D79L+D104P+A112P+A126V+D142L;
[0518] A27K+D79L+Y82F+S87G+D104P+A112P+A126V+D142L;
[0519] A27K+Y82F+S87G+D104P+A112P+A126V+D142L;
[0520] A27K+D79L+Y82F+D104P+A112P+A126V+D142L;
[0521] A27K+Y82F+D104P+A112P+A126V+D142L;
[0522] A27K+D79L+S87P+A112P+D142L; and
[0523] D79L+S87P+D142L.

[0524] In one embodiment, the thermostable protease is a variant of the metallo protease disclosed as the mature part of SEQ ID NO: 2 disclosed in WO2003/048353 or the mature part of SEQ ID NO: 1 in WO2010/008841 with one of the following substitutions or combinations of substitutions:
[0525] D79L+S87P+A112P+D142L;
[0526] D79L+S87P+D142L; and
[0527] A27K+D79L+Y82F+S87G+D104P+A112P+A126V+D142L.

[0528] In one embodiment, the protease variant has at least 75% identity preferably at least 80%, more preferably at least 85%, more preferably at least 90%, more preferably at least 91%, more preferably at least 92%, even more preferably at least 93%, most preferably at least 94%, and even most preferably at least 95%, such as even at least 96%, at least 97%, at least 98%, at least 99%, but less than 100% identity to the mature part of the polypeptide of SEQ ID NO: 2 disclosed in WO2003/048353 or the mature part of SEQ ID NO: 1 in WO2010/008841.

[0529] The thermostable protease may also be derived from any bacterium as long as the protease has the thermostability properties.

[0530] In one embodiment, the thermostable protease is derived from a strain of the bacterium Pyrococcus, such as a strain of Pyrococcus furiosus (pfu protease).

[0531] In one embodiment, the protease is one shown as SEQ ID NO: 1 in U.S. Pat. No. 6,358,726 (Takara Shuzo Company).

[0532] In one embodiment, the thermostable protease is a protease having a mature polypeptide sequence of at least 80% identity, such as at least 85%, such as at least 90%, such as at least 95%, such as at least 96%, such as at least 97%, such as at least 98%, such as at least 99% identity to SEQ ID NO: 1 in U.S. Pat. No. 6,358,726. The Pyrococcus furiosus protease can be purchased from Takara Bio, Japan.

[0533] The Pyrococcus furiosus protease may be a thermostable protease as described in SEQ ID NO: 13 of WO2018/098381. This protease (PfuS) was found to have a thermostability of 110% (80° C./70° C.) and 103% (90° C./70° C.) at pH 4.5 determined.

[0534] In one embodiment a thermostable protease used in a process described herein has a thermostability value of more than 20% determined as Relative Activity at 80° C./70° C. determined as described in Example 2 of WO2018/098381.

[0535] In one embodiment, the protease has a thermostability of more than 30%, more than 40%, more than 50%, more than 60%, more than 70%, more than 80%, more than 90%, more than 100%, such as more than 105%, such as more than 110%, such as more than 115%, such as more than 120% determined as Relative Activity at 80° C./70° C.

[0536] In one embodiment, protease has a thermostability of between 20 and 50%, such as between 20 and 40%, such as 20 and 30% determined as Relative Activity at 80° C./70° C. In one embodiment, the protease has a thermostability between 50 and 115%, such as between 50 and 70%, such as between 50 and 60%, such as between 100 and 120%, such as between 105 and 115% determined as Relative Activity at 80° C./70° C.

[0537] In one embodiment, the protease has a thermostability value of more than 10% determined as Relative Activity at 85° C./70° C. determined as described in Example 2 of WO2018/098381.

[0538] In one embodiment, the protease has a thermostability of more than 10%, such as more than 12%, more than 14%, more than 16%, more than 18%, more than 20%, more than 30%, more than 40%, more that 50%, more than 60%, more than 70%, more than 80%, more than 90%, more than 100%, more than 110% determined as Relative Activity at 85° C./70° C.

[0539] In one embodiment, the protease has a thermostability of between 10% and 50%, such as between 10% and 30%, such as between 10% and 25% determined as Relative Activity at 85° C./70° C.

[0540] In one embodiment, the protease has more than 20%, more than 30%, more than 40%, more than 50%, more than 60%, more than 70%, more than 80%, more than 90% determined as Remaining Activity at 80° C.; and/or the protease has more than 20%, more than 30%, more than 40%, more than 50%, more than 60%, more than 70%, more than 80%, more than 90% determined as Remaining Activity at 84° C.

[0541] Determination of “Relative Activity” and “Remaining Activity” is done as described in Example 2 of WO2018/098381.

[0542] In one embodiment, the protease may have a thermostability for above 90, such as above 100 at 85° C. as determined using the Zein-BCA assay as disclosed in Example 3 of WO2018/098381.

[0543] In one embodiment, the protease has a thermostability above 60%, such as above 90%, such as above 100%, such as above 110% at 85° C. as determined using the Zein-BCA assay of WO2018/098381.

[0544] In one embodiment, protease has a thermostability between 60-120, such as between 70-120%, such as between 80-120%, such as between 90-120%, such as between 100-120%, such as 110-120% at 85° C. as determined using the Zein-BCA assay of WO2018/098381.

[0545] In one embodiment, the thermostable protease has at least 20%, such as at least 30%, such as at least 40%, such as at least 50%, such as at least 60%, such as at least 70%, such as at least 80%, such as at least 90%, such as at least 95%, such as at least 100% of the activity of the JTP196 protease variant or Protease Pfu determined by the AZCL-casein assay of WO2018/098381, and described herein.

[0546] In one embodiment, the thermostable protease has at least 20%, such as at least 30%, such as at least 40%, such as at least 50%, such as at least 60%, such as at least 70%, such as at least 80%, such as at least 90%, such as at least 95%, such as at least 100% of the protease activity of the Protease 196 variant or Protease Pfu determined by the AZCL-casein assay of WO2018/098381.

### Pullulanases

[0547] The host cells and fermenting organisms may express a heterologous pullulanase. The pullulanase can be any protease that is suitable for the host cells and fermenting organisms and/or their methods of use described herein, such as a naturally occurring pullulanase or a variant thereof that retains pullulanase activity. Any pullulanase contemplated for expression by a host cell or fermenting organism described below is also contemplated for embodiments of the invention involving exogenous addition of a pullulanase (e.g., added before, during or after liquefaction and/or saccharification).

[0548] In some embodiments, the host cell or fermenting organism comprising a heterologous polynucleotide encoding a pullulanase has an increased level of pullulanase activity compared to the host cells without the heterologous polynucleotide encoding the pullulanase, when cultivated under the same conditions. In some embodiments, the host cell or fermenting organism has an increased level of pullulanase activity of at least 5%, e.g., at least 10%, at least 15%, at least 20%, at least 25%, at least 50%, at least 100%, at least 150%, at least 200%, at least 300%, or at 500% compared to the host cell or fermenting organism without the heterologous polynucleotide encoding the pullulanase, when cultivated under the same conditions.

[0549] Exemplary pullulanases that can be used with the host cells and/or the methods described herein include bacterial, yeast, or filamentous fungal pullulanases, e.g., obtained from any of the microorganisms described or referenced herein.

[0550] Contemplated pullulanases include the pullulanases from Bacillus amyloderamificans disclosed in U.S. Pat. No. 4,560,651 (hereby incorporated by reference), the pullulanase disclosed as SEQ ID NO: 2 in WO01/151620 (hereby incorporated by reference), the Bacillus deramificans disclosed as SEQ ID NO: 4 in WO01/151620 (hereby incorporated by reference), and the pullulanase from Bacillus acidopullulyticus disclosed as SEQ ID NO: 6 in WO01/151620 (hereby incorporated by reference) and also described in FEMS Mic. Let. (1994) 115, 97-106.

[0551] Additional pullulanases contemplated include the pullulanases from Pyrococcus woesei, specifically from Pyrococcus woesei DSM No. 3773 disclosed in WO92/02614.

[0552] In one embodiment, the pullulanase is a family GH57 pullulanase. In one embodiment, the pullulanase includes an X47 domain as disclosed in U.S. 61/289,040 published as WO2011/087836 (which are hereby incorporated by reference). More specifically the pullulanase may be derived from a strain of the genus Thermococcus, including Thermococcus litoralis and Thermococcus hydrothermalis, such as the Thermococcus hydrothermalis pullulanase truncated at site X4 right after the X47 domain (i.e., amino acids 1-782). The pullulanase may also be a hybrid of the Thermococcus litoralis and Thermococcus hydrothermalis pullulanases or a T. hydrothermalis/T. litoralis hybrid enzyme with truncation site X4 disclosed in U.S. 61/289,040 published as WO2011/087836 (which is hereby incorporated by reference).

[0553] In another embodiment, the pullulanase is one comprising an X46 domain disclosed in WO2011/076123 (Novozymes).

[0554] The pullulanase may be added in an effective amount which include the preferred amount of about 0.0001-10 mg enzyme protein per gram DS, preferably 0.0001-0.10 mg enzyme protein per gram DS, more preferably 0.0001-0.010 mg enzyme protein per gram DS. Pullulanase activity may be determined as NPUN. An Assay for determination of NPUN is described in WO2018/098381.

[0555] Suitable commercially available pullulanase products include PROMOZYME D, PROMOZYME™ D2 (Novozymes A/S, Denmark), OPTIMAX L-300 (DuPont-Danisco, USA), and AMANO 8 (Amano, Japan).

[0556] In one embodiment, the pullulanase is derived from the Bacillus subtilis pullulanase of SEQ ID NO: 114. In one embodiment, the pullulanase is derived from the Bacillus licheniformis pullulanase of SEQ ID NO: 115. In one embodiment, the pullulanase is derived from the Oryza sativa pullulanase of SEQ ID NO: 116. In one embodiment, the pullulanase is derived from the Triticum aestivum pullulanase of SEQ ID NO: 117. In one embodiment, the pullulanase is derived from the Clostridium phytofermentans pullulanase of SEQ ID NO: 118. In one embodiment, the pullulanase is derived from the Streptomyces avermitilis pullulanase of SEQ ID NO: 119. In one embodiment, the pullulanase is derived from the Klebsiella pneumoniae pullulanase of SEQ ID NO: 120.

[0557] Additional pullulanases contemplated for use with the present invention can be found in WO2011/153516 (the content of which is incorporated herein).

[0558] Additional polynucleotides encoding suitable pullulanases may be obtained from microorganisms of any genus, including those readily available within the UniProtKB database.

[0559] The pullulanase coding sequences can also be used to design nucleic acid probes to identify and clone DNA encoding pullulanases from strains of different genera or species, as described supra.

[0560] The polynucleotides encoding pullulanases may also be identified and obtained from other sources including microorganisms isolated from nature (e.g., soil, composts, water, etc.) or DNA samples obtained directly from natural materials (e.g., soil, composts, water, etc.) as described supra.

[0561] Techniques used to isolate or clone polynucleotides encoding pullulanases are described supra.

[0562] In one embodiment, the pullulanase has a mature polypeptide sequence that comprises or consists of the amino acid sequence of any one of the pullulanases described or referenced herein (e.g., any one of SEQ ID NOs: 114-120). In another embodiment, the pullulanase has a mature polypeptide sequence that is a fragment of the any one of the pullulanases described or referenced herein (e.g., any one of SEQ ID NOs: 114-120). In one embodiment, the number of amino acid residues in the fragment is at least 75%, e.g., at least 80%, 85%, 90%, or 95% of the number of amino acid residues in referenced full length pullulanase. In other embodiments, the pullulanase may comprise the catalytic domain of any pullulanase described or referenced herein (e.g., any one of SEQ ID NOs: 114-120).

[0563] The pullulanase may be a variant of any one of the pullulanases described supra (e.g., any one of SEQ ID NOs: 114-120). In one embodiment, the pullulanase has a mature polypeptide sequence of at least 60%, e.g., at least 65%, 70%, 75%, 80%, 85%, 90%, 95%, 97%, 98%, 99%, or 100% sequence identity to any one of the pullulanases described supra (e.g., any one of SEQ ID NOs: 114-120).

[0564] Examples of suitable amino acid changes, such as conservative substitutions that do not significantly affect the folding and/or activity of the pullulanase, are described herein.

[0565] In one embodiment, the pullulanase has a mature polypeptide sequence that differs by no more than ten amino acids, e.g., by no more than five amino acids, by no more than four amino acids, by no more than three amino acids, by no more than two amino acids, or by one amino acid from the amino acid sequence of any one of the pullulanases described supra (e.g., any one of SEQ ID NOs: 114-120). In one embodiment, the pullulanase has an amino acid substitution, deletion, and/or insertion of one or more (e.g., two, several) of amino acid sequence of any one of the pullulanases described supra (e.g., any one of SEQ ID NOs: 114-120). In some embodiments, the total number of amino acid substitutions, deletions and/or insertions is not more than 10, e.g., not more than 9, 8, 7, 6, 5, 4, 3, 2, or 1.

[0566] In some embodiments, the pullulanase has at least 20%, e.g., at least 40%, at least 50%, at least 60%, at least 70%, at least 80%, at least 90%, at least 95%, at least 96%, at least 97%, at least 98%, at least 99%, or 100% of the pullulanase activity of any pullulanase described or referenced herein under the same conditions (e.g., any one of SEQ ID NOs: 114-120).

[0567] In one embodiment, the pullulanase coding sequence hybridizes under at least low stringency conditions, e.g., medium stringency conditions, medium-high stringency conditions, high stringency conditions, or very high stringency conditions with the full-length complementary strand of the coding sequence from any pullulanase described or referenced herein (e.g., any one of SEQ ID NOs: 114-120). In one embodiment, the pullulanase coding sequence has at least 65%, e.g., at least 70%, at least 75%, at least 80%, at least 85%, at least 85%, at least 90%, at least 91%, at least 92%, at least 93%, at least 94%, at least 95%, at least 96%, at least 97%, at least 98%, at least 99%, or 100% sequence identity with the coding sequence from any pullulanase described or referenced herein (e.g., any one of SEQ ID NOs: 114-120).

[0568] In one embodiment, the pullulanase comprises the coding sequence of any pullulanase described or referenced herein (e.g., any one of SEQ ID NOs: 114-120). In one embodiment, the pullulanase comprises a coding sequence that is a subsequence of the coding sequence from any pullulanase described or referenced herein, wherein the subsequence encodes a polypeptide having pullulanase activity. In one embodiment, the number of nucleotides residues in the subsequence is at least 75%, e.g., at least 80%, 85%, 90%, or 95% of the number of the referenced coding sequence.

[0569] The referenced pullulanase coding sequence of any related aspect or embodiment described herein can be the native coding sequence or a degenerate sequence, such as a codon-optimized coding sequence designed for use in a particular host cell (e.g., optimized for expression in Saccharomyces cerevisiae).

[0570] The pullulanase can also include fused polypeptides or cleavable fusion polypeptides, as described supra.

### Active Pentose Fermentation Pathway

[0571] The host cells or fermenting organisms described herein (e.g., yeast cells) may comprise an active pentose fermentation pathway, such as an active xylose fermentation pathway and/or and active arabinose fermentation pathway as described in more detail below. Pentose fermentation pathways and pathway genes and corresponding engineered transformants for fermentation of pentose (e.g., xylose, arabinose) are known in the art.

[0572] Any suitable pentose fermentation pathway gene, endogenous or heterologous, may be used and expressed in sufficient amount to produce an enzyme involved in a selected pentose fermentation pathway. With the complete genome sequence available for now numerous microorganism genomes and a variety of yeast, fungi, plant, and mammalian genomes, the identification of genes encoding the selected pentose fermentation pathway enzymatic activities taught herein is routine and well known in the art for a selected host. For example, suitable homologues, orthologs, paralogs and nonorthologous gene displacements of known genes, and the interchange of genetic alterations between organisms can be identified in related or distant host to a selected host.

[0573] For host cells without a known genome sequence, sequences for genes of interest (either as overexpression candidates or as insertion sites) can typically be obtained using techniques known in the art. Routine experimental design can be employed to test expression of various genes and activity of various enzymes, including genes and enzymes that function in a pentose fermentation pathway. Experiments may be conducted wherein each enzyme is expressed in the cell individually and in blocks of enzymes up to and including preferably all pathway enzymes, to establish which are needed (or desired) for improved pentose fermentation. One illustrative experimental design tests expression of each individual enzyme as well as of each unique pair of enzymes, and further can test expression of all required enzymes, or each unique combination of enzymes. A number of approaches can be taken, as will be appreciated.

[0574] The host cells of the invention can be produced by introducing heterologous polynucleotides encoding one or more of the enzymes participating in an active pentose fermentation pathway, as described below. As one in the art will appreciate, in some instances (e.g., depending on the selection of host) the heterologous expression of every gene shown in the active pentose fermentation may not be required since a host cell may have endogenous enzymatic activity from one or more pathway genes. For example, if a chosen host is deficient in one or more enzymes of an active pentose fermentation pathway, then heterologous polynucleotides for the deficient enzyme(s) are introduced into the host for subsequent expression. Alternatively, if the chosen host exhibits endogenous expression of some pathway genes, but is deficient in others, then an encoding polynucleotide is needed for the deficient enzyme(s) to achieve pentose fermentation. Thus, a recombinant host cell of the invention can be produced by introducing heterologous polynucleotides to obtain the enzyme activities of a desired biosynthetic pathway or a desired biosynthetic pathway can be obtained by introducing one or more heterologous polynucleotides that, together with one or more endogenous enzymes, produces a desired product such as ethanol.

[0575] Depending on the pentose fermentation pathway constituents of a selected recombinant host organism, the host cells of the invention will include at least one heterologous polynucleotide and optionally up to all encoding heterologous polynucleotides for the pentose fermentation pathway. For example, pentose fermentation can be established in a host deficient in a pentose fermentation pathway enzyme through heterologous expression of the corresponding polynucleotide. In a host deficient in all enzymes of a pentose fermentation pathway, heterologous expression of all enzymes in the pathway can be included, although it is understood that all enzymes of a pathway can be expressed even if the host contains at least one of the pathway enzymes.

[0576] The enzymes of the selected active pentose fermentation pathway, and activities thereof, can be detected using methods known in the art or as described herein. These detection methods may include use of specific antibodies, formation of an enzyme product, or disappearance of an enzyme substrate. See, for example, Sambrook et al., Molecular Cloning: A Laboratory Manual, Third Ed., Cold Spring Harbor Laboratory, New York (2001); Ausubel et al., Current Protocols in Molecular Biology, John Wiley and Sons, Baltimore, M D (1999); and Hanai et al., Appl. Environ. Microbiol. 73:7814-7818 (2007)).

[0577] The active pentose fermentation pathway may be an active xylose fermentation pathway. Exemplary xylose fermentation pathways are known in the art (e.g., WO2003/062430, WO2003/078643, WO2004/067760, WO2006/096130, WO2009/017441, WO2010/059095, WO2011/059329, WO2011/123715, WO2012/113120, WO2012/135110, WO2013/081700, WO2018/112638 and US2017/088866). Any xylose fermentation pathway or gene thereof described in the foregoing references is incorporated herein by reference for use in Applicant's active xylose fermentation pathway. Conversion of D-xylose to D-xylulose 5-phosphate may then be fermented to ethanol via the pentose phosphate pathway. The oxido-reductase pathway uses an aldolase reductase (AR, such as xylose reductase (XR)) to reduce D-xylose to xylitol followed by oxidation of xylitol to D-xylulose with xylitol dehydrogenase (XDH; also known as D-xylulose reductase). The isomerase pathway uses xylose isomerase (XI) to convert D-xylose into D-xylulose. D-xylulose is then converted to D-xylulose-5-phosphate with xylulokinase (XK)

[0578] In one embodiment, the host cell or fermenting organism (e.g., yeast cell) further comprises a heterologous polynucleotide encoding a xylose isomerase (XI). The xylose isomerase may be any xylose isomerase that is suitable for the host cells and the methods described herein, such as a naturally occurring xylose isomerase or a variant thereof that retains xylose isomerase activity. In one embodiment, the xylose isomerase is present in the cytosol of the host cells.

[0579] In some embodiments, the host cell or fermenting organism comprising a heterologous polynucleotide encoding a xylose isomerase has an increased level of xylose isomerase activity compared to the host cells without the heterologous polynucleotide encoding the xylose isomerase, when cultivated under the same conditions. In some embodiments, the host cells or fermenting organisms have an increased level of xylose isomerase activity of at least 5%, e.g., at least 10%, at least 15%, at least 20%, at least 25%, at least 50%, at least 100%, at least 150%, at least 200%, at least 300%, or at 500% compared to the host cells without the heterologous polynucleotide encoding the xylose isomerase, when cultivated under the same conditions.

[0580] Exemplary xylose isomerases that can be used with the recombinant host cells and methods of use described herein include, but are not limited to, XIs from the fungus Piromyces sp. (WO2003/062430) or other sources (Madhavan et al., 2009, Appl Microbiol Biotechnol. 82(6), 1067-1078) have been expressed in S. cerevisiae host cells. Still other XIs suitable for expression in yeast have been described in US 2012/0184020 (an XI from Ruminococcus flavefaciens), WO2011/078262 (several XIs from Reticulitermes speratus and Mastotermes darwiniensis) and WO2012/009272 (constructs and fungal cells containing an XI from Abiotrophia defectiva). U.S. Pat. No. 8,586,336 describes a S. cerevisiae host cell expressing an XI obtained by bovine rumen fluid (shown herein as SEQ ID NO: 74).

[0581] Additional polynucleotides encoding suitable xylose isomerases may be obtained from microorganisms of any genus, including those readily available within the UniProtKB database. In one embodiment, the xylose isomerases is a bacterial, a yeast, or a filamentous fungal xylose isomerase, e.g., obtained from any of the microorganisms described or referenced herein, as described supra.

[0582] The xylose isomerase coding sequences can also be used to design nucleic acid probes to identify and clone DNA encoding xylose isomerases from strains of different genera or species, as described supra.

[0583] The polynucleotides encoding xylose isomerases may also be identified and obtained from other sources including microorganisms isolated from nature (e.g., soil, composts, water, etc.) or DNA samples obtained directly from natural materials (e.g., soil, composts, water, etc.) as described supra.

[0584] Techniques used to isolate or clone polynucleotides encoding xylose isomerases are described supra.

[0585] In one embodiment, the xylose isomerase has a mature polypeptide sequence of having at least 60%, e.g., at least 65%, at least 70%, at least 75%, at least 80%, at least 85%, at least 90%, at least 91%, at least 92%, at least 93%, at least 94%, at least 95%, at least 96%, at least 97%, at least 98%, at least 99%, or 100% sequence identity to any xylose isomerase described or referenced herein (e.g., the xylose isomerase of SEQ ID NO: 74). In one embodiment, the xylose isomerase has a mature polypeptide sequence that differs by no more than ten amino acids, e.g., by no more than five amino acids, by no more than four amino acids, by no more than three amino acids, by no more than two amino acids, or by one amino acid from any xylose isomerase described or referenced herein (e.g., the xylose isomerase of SEQ ID NO: 74). In one embodiment, the xylose isomerase has a mature polypeptide sequence that comprises or consists of the amino acid sequence of any xylose isomerase described or referenced herein (e.g., the xylose isomerase of SEQ ID NO: 74), allelic variant, or a fragment thereof having xylose isomerase activity. In one embodiment, the xylose isomerase has an amino acid substitution, deletion, and/or insertion of one or more (e.g., two, several) amino acids. In some embodiments, the total number of amino acid substitutions, deletions and/or insertions is not more than 10, e.g., not more than 9, 8, 7, 6, 5, 4, 3, 2, or 1.

[0586] In some embodiments, the xylose isomerase has at least 20%, e.g., at least 40%, at least 50%, at least 60%, at least 70%, at least 80%, at least 90%, at least 95%, at least 96%, at least 97%, at least 98%, at least 99%, or 100% of the xylose isomerase activity of any xylose isomerase described or referenced herein (e.g., the xylose isomerase of SEQ ID NO: 74) under the same conditions.

[0587] In one embodiment, the xylose isomerase coding sequence hybridizes under at least low stringency conditions, e.g., medium stringency conditions, medium-high stringency conditions, high stringency conditions, or very high stringency conditions with the full-length complementary strand of the coding sequence from any xylose isomerase described or referenced herein (e.g., the xylose isomerase of SEQ ID NO: 74). In one embodiment, the xylose isomerase coding sequence has at least 65%, e.g., at least 70%, at least 75%, at least 80%, at least 85%, at least 85%, at least 90%, at least 91%, at least 92%, at least 93%, at least 94%, at least 95%, at least 96%, at least 97%, at least 98%, at least 99%, or 100% sequence identity with the coding sequence from any xylose isomerase described or referenced herein (e.g., the xylose isomerase of SEQ ID NO: 74).

[0588] In one embodiment, the heterologous polynucleotide encoding the xylose isomerase comprises the coding sequence of any xylose isomerase described or referenced herein (e.g., the xylose isomerase of SEQ ID NO: 74). In one embodiment, the heterologous polynucleotide encoding the xylose isomerase comprises a subsequence of the coding sequence from any xylose isomerase described or referenced herein, wherein the subsequence encodes a polypeptide having xylose isomerase activity. In one embodiment, the number of nucleotides residues in the subsequence is at least 75%, e.g., at least 80%, 85%, 90%, or 95% of the number of the referenced coding sequence.

[0589] The xylose isomerases can also include fused polypeptides or cleavable fusion polypeptides, as described supra.

[0590] In one embodiment, the host cell or fermenting organism (e.g., yeast cell) further comprises a heterologous polynucleotide encoding a xylulokinase (XK). A xylulokinase, as used herein, provides enzymatic activity for converting D-xylulose to xylulose 5-phosphate. The xylulokinase may be any xylulokinase that is suitable for the host cells and the methods described herein, such as a naturally occurring xylulokinase or a variant thereof that retains xylulokinase activity. In one embodiment, the xylulokinase is present in the cytosol of the host cells.

[0591] In some embodiments, the host cells or fermenting organisms comprising a heterologous polynucleotide encoding a xylulokinase have an increased level of xylulokinase activity compared to the host cells without the heterologous polynucleotide encoding the xylulokinase, when cultivated under the same conditions. In some embodiments, the host cells have an increased level of xylose isomerase activity of at least 5%, e.g., at least 10%, at least 15%, at least 20%, at least 25%, at least 50%, at least 100%, at least 150%, at least 200%, at least 300%, or at 500% compared to the host cells without the heterologous polynucleotide encoding the xylulokinase, when cultivated under the same conditions.

[0592] Exemplary xylulokinases that can be used with the host cells and fermenting organisms, and methods of use described herein include, but are not limited to, the Saccharomyces cerevisiae xylulokinase of SEQ ID NO: 75. Additional polynucleotides encoding suitable xylulokinases may be obtained from microorganisms of any genus, including those readily available within the UniProtKB database. In one embodiment, the xylulokinases is a bacterial, a yeast, or a filamentous fungal xylulokinase, e.g., obtained from any of the microorganisms described or referenced herein, as described supra.

[0593] The xylulokinase coding sequences can also be used to design nucleic acid probes to identify and clone DNA encoding xylulokinases from strains of different genera or species, as described supra.

[0594] The polynucleotides encoding xylulokinases may also be identified and obtained from other sources including microorganisms isolated from nature (e.g., soil, composts, water, etc.) or DNA samples obtained directly from natural materials (e.g., soil, composts, water, etc.) as described supra.

[0595] Techniques used to isolate or clone polynucleotides encoding xylulokinases are described supra.

[0596] In one embodiment, the xylulokinase has a mature polypeptide sequence of at least 60%, e.g., at least 65%, at least 70%, at least 75%, at least 80%, at least 85%, at least 90%, at least 91%, at least 92%, at least 93%, at least 94%, at least 95%, at least 96%, at least 97%, at least 98%, at least 99%, or 100% sequence identity to any xylulokinase described or referenced herein (e.g., the Saccharomyces cerevisiae xylulokinase of SEQ ID NO: 75). In one embodiment, the xylulokinase has a mature polypeptide sequence that differs by no more than ten amino acids, e.g., by no more than five amino acids, by no more than four amino acids, by no more than three amino acids, by no more than two amino acids, or by one amino acid from any xylulokinase described or referenced herein (e.g., the Saccharomyces cerevisiae xylulokinase of SEQ ID NO: 75). In one embodiment, the xylulokinase has a mature polypeptide sequence that comprises or consists of the amino acid sequence of any xylulokinase described or referenced herein (e.g., the Saccharomyces cerevisiae xylulokinase of SEQ ID NO: 75), allelic variant, or a fragment thereof having xylulokinase activity. In one embodiment, the xylulokinase has an amino acid substitution, deletion, and/or insertion of one or more (e.g., two, several) amino acids. In some embodiments, the total number of amino acid substitutions, deletions and/or insertions is not more than 10, e.g., not more than 9, 8, 7, 6, 5, 4, 3, 2, or 1.

[0597] In some embodiments, the xylulokinase has at least 20%, e.g., at least 40%, at least 50%, at least 60%, at least 70%, at least 80%, at least 90%, at least 95%, at least 96%, at least 97%, at least 98%, at least 99%, or 100% of the xylulokinase activity of any xylulokinase described or referenced herein (e.g., the Saccharomyces cerevisiae xylulokinase of SEQ ID NO: 75) under the same conditions.

[0598] In one embodiment, the xylulokinase coding sequence hybridizes under at least low stringency conditions, e.g., medium stringency conditions, medium-high stringency conditions, high stringency conditions, or very high stringency conditions with the full-length complementary strand of the coding sequence from any xylulokinase described or referenced herein (e.g., the Saccharomyces cerevisiae xylulokinase of SEQ ID NO: 75). In one embodiment, the xylulokinase coding sequence has at least 65%, e.g., at least 70%, at least 75%, at least 80%, at least 85%, at least 85%, at least 90%, at least 91%, at least 92%, at least 93%, at least 94%, at least 95%, at least 96%, at least 97%, at least 98%, at least 99%, or 100% sequence identity with the coding sequence from any xylulokinase described or referenced herein (e.g., the Saccharomyces cerevisiae xylulokinase of SEQ ID NO: 75).

[0599] In one embodiment, the heterologous polynucleotide encoding the xylulokinase comprises the coding sequence of any xylulokinase described or referenced herein (e.g., the Saccharomyces cerevisiae xylulokinase of SEQ ID NO: 75). In one embodiment, the heterologous polynucleotide encoding the xylulokinase comprises a subsequence of the coding sequence from any xylulokinase described or referenced herein, wherein the subsequence encodes a polypeptide having xylulokinase activity. In one embodiment, the number of nucleotides residues in the subsequence is at least 75%, e.g., at least 80%, 85%, 90%, or 95% of the number of the referenced coding sequence.

[0600] The xylulokinases can also include fused polypeptides or cleavable fusion polypeptides, as described supra.

[0601] In one embodiment, the host cell or fermenting organism (e.g., yeast cell) further comprises a heterologous polynucleotide encoding a ribulose 5 phosphate 3-epimerase (RPE1). A ribulose 5 phosphate 3-epimerase, as used herein, provides enzymatic activity for converting L-ribulose 5-phosphate to L-xylulose 5-phosphate (EC 5.1.3.22). The RPE1 may be any RPE1 that is suitable for the host cells and the methods described herein, such as a naturally occurring RPE1 or a variant thereof that retains RPE1 activity. In one embodiment, the RPE1 is present in the cytosol of the host cells.

[0602] In one embodiment, the recombinant cell comprises a heterologous polynucleotide encoding a ribulose 5 phosphate 3-epimerase (RPE1), wherein the RPE1 is Saccharomyces cerevisiae RPE1, or an RPE1 having at least 60%, e.g., at least 65%, 70%, 75%, 80%, 85%, 90%, 95%, 97%, 98%, 99%, or 100% sequence identity to a Saccharomyces cerevisiae RPE1.

[0603] In one embodiment, the host cell or fermenting organism (e.g., yeast cell) further comprises a heterologous polynucleotide encoding a ribulose 5 phosphate isomerase (RKI1). A ribulose 5 phosphate isomerase, as used herein, provides enzymatic activity for converting ribose-5-phophate to ribulose 5-phosphate. The RKI1 may be any RKI1 that is suitable for the host cells and the methods described herein, such as a naturally occurring RKI1 or a variant thereof that retains RKI1 activity. In one embodiment, the RKI1 is present in the cytosol of the host cells.

[0604] In one embodiment, the host cell or fermenting organism comprises a heterologous polynucleotide encoding a ribulose 5 phosphate isomerase (RKI1), wherein the RKI1 is a Saccharomyces cerevisiae RKI1, or an RKI1 having a mature polypeptide sequence of at least 60%, e.g., at least 65%, 70%, 75%, 80%, 85%, 90%, 95%, 97%, 98%, 99%, or 100% sequence identity to a Saccharomyces cerevisiae RKI1.

[0605] In one embodiment, the host cell or fermenting organism (e.g., yeast cell) further comprises a heterologous polynucleotide encoding a transketolase (TKL1). The TKL1 may be any TKL1 that is suitable for the host cells and the methods described herein, such as a naturally occurring TKL1 or a variant thereof that retains TKL1 activity. In one embodiment, the TKL1 is present in the cytosol of the host cells.

[0606] In one embodiment, the host cell or fermenting organism comprises a heterologous polynucleotide encoding a transketolase (TKL1), wherein the TKL1 is a Saccharomyces cerevisiae TKL1, or a TKL1 having a mature polypeptide sequence of at least 60%, e.g., at least 65%, 70%, 75%, 80%, 85%, 90%, 95%, 97%, 98%, 99%, or 100% sequence identity to a Saccharomyces cerevisiae TKL1.

[0607] In one embodiment, the host cell or fermenting organism (e.g., yeast cell) further comprises a heterologous polynucleotide encoding a transaldolase (TAL1). The TAL1 may be any TAL1 that is suitable for the host cells and the methods described herein, such as a naturally occurring TAL1 or a variant thereof that retains TAL1 activity. In one embodiment, the TAL1 is present in the cytosol of the host cells.

[0608] In one embodiment, the host cell or fermenting organism comprises a heterologous polynucleotide encoding a transketolase (TAL1), wherein the TAL1 is a Saccharomyces cerevisiae TAL1, or a TAL1 having a mature polypeptide sequence of at least 60%, e.g., at least 65%, 70%, 75%, 80%, 85%, 90%, 95%, 97%, 98%, 99%, or 100% sequence identity to a Saccharomyces cerevisiae TAL1.

[0609] The active pentose fermentation pathway may be an active arabinose fermentation pathway. Exemplary arabinose fermentation pathways are known in the art (e.g., WO2002/066616; WO2003/095627; WO2007/143245; WO2008/041840; WO2009/011591; WO2010/151548; WO2011/003893; WO2011/131674; WO2012/143513; US2012/225464; U.S. Pat. No. 7,977,083). Any arabinose fermentation pathway or gene thereof described in the foregoing references is incorporated herein by reference for use in Applicant's active xylose fermentation pathway. The bacterial arabinose fermentation pathway utilizes genes L-arabinose isomerase (AI, such as araA), L-ribulokinase (RK, such as araB), and L-ribulose-5-P4-epimerase (R5PE, such as araD) to convert L-arabinose to D-xylulose 5-phosphate. The fungal arabinose fermentation pathway proceeds using aldose reductase (AR), L-arabinitol 4-dehydrogenase (LAD), L-xylulose reductase (LXR), xylitol dehydrogenase (XDH, also known as D-xylulose reductase) and xylulokinase (XK).

[0610] In one embodiment, the host cell or fermenting organism (e.g., yeast cell) further comprises a heterologous polynucleotide encoding a L-xylulose reductase (LXR). A L-xylulose reductase, as used herein, provides enzymatic activity for converting L-xylulose to xylitol. The L-xylulose reductase may be any L-xylulose reductase that is suitable for the host cells and the methods described herein, such as a naturally occurring xylulokinase or a variant thereof that retains L-xylulose reductase activity. In one embodiment, the L-xylulose reductase is present in the cytosol of the host cells.

[0611] In some embodiments, the host cells or fermenting organisms comprising a heterologous polynucleotide encoding a L-xylulose reductase (LXR) have an increased level of L-xylulose reductase activity compared to the host cells without the heterologous polynucleotide encoding the L-xylulose reductase, when cultivated under the same conditions. In some embodiments, the host cells have an increased level of L-xylulose reductase activity of at least 5%, e.g., at least 10%, at least 15%, at least 20%, at least 25%, at least 50%, at least 100%, at least 150%, at least 200%, at least 300%, or at 500% compared to the host cells without the heterologous polynucleotide encoding the L-xylulose reductase, when cultivated under the same conditions.

[0612] Exemplary L-xylulose reductases (LXRs) that can be used with the host cells and fermenting organisms, and methods of use described herein include, but are not limited to, the Saccharomyces cerevisiae xylulokinase of SEQ ID NO: 75, the Scheffersomyces stipitis xylulokinase of SEQ ID NO: 310 and the Aspergillus niger xylulokinase of SEQ ID NO: 311.

[0613] Exemplary L-xylulose reductases (LXRs) that may be expressed with the host cells or fermenting organisms and methods of use described herein include, but are not limited to the L-xylulose reductases (LXRs) shown in Table 8 (or derivatives thereof).

TABLE 8

| | | SEQ ID NO: |
|---|---|---|
| Donor Organism | Gene ID | (mature polypeptide) |
| A. brasiliensis | EFP7G1BZ1 | 297 |
| C. sorboxylosa | EFP5PTNSX | 298 |
| B. anomalus | EFP480208 | 299 |
| T. leycettanus | EFP3RCJ9K | 300 |
| K. capsulata | EFP2CH8R5 | 301 |
| A. aculeatus | EFP2BNSMN | 302 |
| P. membranifaciens | EFP16N8ZZ | 303 |
| A. niger | G3YG17 | 304 |
| T. reesei | Q8NK50 | 305 |
| A. monospora | Q70FD1 | 306 |
| C. arabinofermentans | A0A1E4T269 | 307 |
| O. parapolymorpha | E7R859 | 308 |

[0614] Additional polynucleotides encoding suitable L-xylulose reductases (LXRs) may be obtained from microorganisms of any genus, including those readily available within the UniProtKB database. In one embodiment, the L-xylulose reductase is a bacterial, a yeast, or a filamentous fungal L-xylulose reductase, e.g., obtained from any of the microorganisms described or referenced herein, as described supra.

[0615] The L-xylulose reductase (LXR) coding sequences can also be used to design nucleic acid probes to identify and clone DNA encoding L-xylulose reductases from strains of different genera or species, as described supra.

[0616] The polynucleotides encoding L-xylulose reductases (LXR) may also be identified and obtained from other sources including microorganisms isolated from nature (e.g., soil, composts, water, etc.) or DNA samples obtained directly from natural materials (e.g., soil, composts, water, etc.) as described supra.

[0617] Techniques used to isolate or clone polynucleotides encoding L-xylulose reductases (LXRs) are described supra.

[0618] In one embodiment, the L-xylulose reductase (LXR) has a mature polypeptide sequence of at least 60%, e.g., at least 65%, at least 70%, at least 75%, at least 80%, at least 85%, at least 90%, at least 91%, at least 92%, at least 93%, at least 94%, at least 95%, at least 96%, at least 97%, at least 98%, at least 99%, or 100% sequence identity to any xylulokinase described or referenced herein (e.g., the L-xylulose reductase of any one of SEQ ID NOs: 297-308; such as SEQ ID NO: 297, 300, 302, or 304). In one embodiment, the L-xylulose reductase has a mature polypeptide sequence that differs by no more than ten amino acids, e.g., by no more than five amino acids, by no more than four amino acids, by no more than three amino acids, by no more than two amino acids, or by one amino acid from any L-xylulose reductase described or referenced herein (e.g., the L-xylulose reductase of any one of SEQ ID NOs: 297-308; such as SEQ ID NO: 297, 300, 302, or 304). In one embodiment, the L-xylulose reductase has a mature polypeptide sequence that comprises or consists of the amino acid sequence of any L-xylulose reductase described or referenced herein (e.g., the L-xylulose reductase of any one of SEQ ID NOs: 297-308; such as SEQ ID NO: 297, 300, 302, or 304), allelic variant, or a fragment thereof having L-xylulose reductase activity. In one embodiment, the L-xylulose reductase has an amino acid substitution, deletion, and/or insertion of one or more (e.g., two, several) amino acids. In some embodiments, the total number of amino acid substitutions, deletions and/or insertions is not more than 10, e.g., not more than 9, 8, 7, 6, 5, 4, 3, 2, or 1.

[0619] In some embodiments, the L-xylulose reductase (LXR) has at least 20%, e.g., at least 40%, at least 50%, at least 60%, at least 70%, at least 80%, at least 90%, at least 95%, at least 96%, at least 97%, at least 98%, at least 99%, or 100% of the L-xylulose reductase activity of any L-xylulose reductase described or referenced herein (e.g., the L-xylulose reductase of any one of SEQ ID NOs: 297-308; such as SEQ ID NO: 297, 300, 302, or 304) under the same conditions.

[0620] In one embodiment, the L-xylulose reductase (LXR) coding sequence hybridizes under at least low stringency conditions, e.g., medium stringency conditions, medium-high stringency conditions, high stringency conditions, or very high stringency conditions with the full-length complementary strand of the coding sequence from any L-xylulose reductase described or referenced herein (e.g., the L-xylulose reductase of any one of SEQ ID NOs: 297-308; such as SEQ ID NO: 297, 300, 302, or 304). In one embodiment, the L-xylulose reductase coding sequence has at least 65%, e.g., at least 70%, at least 75%, at least 80%, at least 85%, at least 85%, at least 90%, at least 91%, at least 92%, at least 93%, at least 94%, at least 95%, at least 96%, at least 97%, at least 98%, at least 99%, or 100% sequence identity with the coding sequence from any L-xylulose reductase described or referenced herein (e.g., the L-xylulose reductase of any one of SEQ ID NOs: 297-308; such as SEQ ID NO: 297, 300, 302, or 304).

[0621] In one embodiment, the heterologous polynucleotide encoding the L-xylulose reductase (LXR) comprises the coding sequence of any L-xylulose reductase described or referenced herein (e.g., the L-xylulose reductase of any one of SEQ ID NOs: 297-308; such as SEQ ID NO: 297, 300, 302, or 304). In one embodiment, the heterologous polynucleotide encoding the L-xylulose reductase comprises a subsequence of the coding sequence from any L-xylulose reductase described or referenced herein, wherein the subsequence encodes a polypeptide having L-xylulose reductase activity. In one embodiment, the number of nucleotides residues in the subsequence is at least 75%, e.g., at least 80%, 85%, 90%, or 95% of the number of the referenced coding sequence.

[0622] The L-xylulose reductases (LXRs) can also include fused polypeptides or cleavable fusion polypeptides, as described supra.

[0623] In one embodiment, the host cell or fermenting organism (e.g., yeast cell) further comprises a heterologous polynucleotide encoding an aldose reductase (AR). An aldose reductase, as used herein, provides enzymatic activity for converting L-arabinose to L-arabitol, and may also have enzymatic activity for converting D-xylose to xylitol (known as a xylose reductase, XR). The aldose reductase may be any aldose reductase that is suitable for the host cells and the methods described herein, such as a naturally occurring aldose reductase or a variant thereof that retains aldose reductase activity. In one embodiment, the aldose reductase is present in the cytosol of the host cells.

[0624] In some embodiments, the host cells or fermenting organisms comprising a heterologous polynucleotide encoding an aldose reductase (AR) have an increased level of aldose reductase activity compared to the host cells without the heterologous polynucleotide encoding the aldose reductase, when cultivated under the same conditions. In some embodiments, the host cells have an increased level of aldose reductase activity of at least 5%, e.g., at least 10%, at least 15%, at least 20%, at least 25%, at least 50%, at least 100%, at least 150%, at least 200%, at least 300%, or at 500% compared to the host cells without the heterologous polynucleotide encoding the aldose reductase, when cultivated under the same conditions.

[0625] Exemplary aldose reductases (ARs) that can be used with the host cells and fermenting organisms, and methods of use described herein include, but are not limited to, the Aspergillus niger aldose reductase of SEQ ID NO: 281, the Aspergillus oryzae aldose reductase of SEQ ID NO: 282, the Magnaporthe oryzae aldose reductase of SEQ ID NO: 283, the Meyerozyma guilliermondii aldose reductase of SEQ ID NO: 284 and the Scheffersomyces stipitis aldose reductase of SEQ ID NO: 285. Additional polynucleotides encoding suitable aldose reductase may be obtained from microorganisms of any genus, including those readily available within the UniProtKB database. In one embodiment, the aldose reductase is a bacterial, a yeast, or a filamentous fungal aldose reductase, e.g., obtained from any of the microorganisms described or referenced herein, as described supra.

[0626] The aldose reductase (AR) coding sequences can also be used to design nucleic acid probes to identify and clone DNA encoding aldose reductases from strains of different genera or species, as described supra.

[0627] The polynucleotides encoding the aldose reductases (ARs) may also be identified and obtained from other sources including microorganisms isolated from nature (e.g., soil, composts, water, etc.) or DNA samples obtained directly from natural materials (e.g., soil, composts, water, etc.) as described supra.

[0628] Techniques used to isolate or clone polynucleotides encoding aldose reductases (ARs) are described supra.

[0629] In one embodiment, the aldose reductase (AR) has a mature polypeptide sequence of at least 60%, e.g., at least 65%, at least 70%, at least 75%, at least 80%, at least 85%, at least 90%, at least 91%, at least 92%, at least 93%, at least 94%, at least 95%, at least 96%, at least 97%, at least 98%, at least 99%, or 100% sequence identity to any aldose reductase described or referenced herein (e.g., the aldose reductase of SEQ ID NO: 281, 282, 283, 284 or 285). In one embodiment, the aldose reductase has a mature polypeptide sequence that differs by no more than ten amino acids, e.g., by no more than five amino acids, by no more than four amino acids, by no more than three amino acids, by no more than two amino acids, or by one amino acid from any aldose reductase described or referenced herein (e.g., the aldose reductase of SEQ ID NO: 281, 282, 283, 284 or 285). In one embodiment, the aldose reductase has a mature polypeptide sequence that comprises or consists of the amino acid sequence of any aldose reductase described or referenced herein (e.g., the aldose reductase of SEQ ID NO: 281, 282, 283, 284 or 285), allelic variant, or a fragment thereof having aldose reductase activity. In one embodiment, the aldose reductase has an amino acid substitution, deletion, and/or insertion of one or more (e.g., two, several) amino acids. In some embodiments, the total number of amino acid substitutions, deletions and/or insertions is not more than 10, e.g., not more than 9, 8, 7, 6, 5, 4, 3, 2, or 1.

[0630] In some embodiments, the aldose reductase (AR) has at least 20%, e.g., at least 40%, at least 50%, at least 60%, at least 70%, at least 80%, at least 90%, at least 95%, at least 96%, at least 97%, at least 98%, at least 99%, or 100% of the aldose reductase activity of any aldose reductase described or referenced herein (e.g., the aldose reductase of SEQ ID NO: 281, 282, 283, 284 or 285) under the same conditions.

[0631] In one embodiment, the aldose reductase (AR) coding sequence hybridizes under at least low stringency conditions, e.g., medium stringency conditions, medium-high stringency conditions, high stringency conditions, or very high stringency conditions with the full-length complementary strand of the coding sequence from any aldose reductase described or referenced herein (e.g., the aldose reductase of SEQ ID NO: 281, 282, 283, 284 or 285). In one embodiment, the aldose reductase coding sequence has at least 65%, e.g., at least 70%, at least 75%, at least 80%, at least 85%, at least 85%, at least 90%, at least 91%, at least 92%, at least 93%, at least 94%, at least 95%, at least 96%, at least 97%, at least 98%, at least 99%, or 100% sequence identity with the coding sequence from any aldose reductase described or referenced herein (e.g., the aldose reductase of SEQ ID NO: 281, 282, 283, 284, or 285).

[0632] In one embodiment, the heterologous polynucleotide encoding the aldose reductase (AR) comprises the coding sequence of any aldose reductase described or referenced herein (e.g., the aldose reductase of SEQ ID NO: 281, 282, 283, 284, or 285). In one embodiment, the heterologous polynucleotide encoding the aldose reductase comprises a subsequence of the coding sequence from any aldose reductase described or referenced herein, wherein the subsequence encodes a polypeptide having aldose reductase activity. In one embodiment, the number of nucleotides residues in the subsequence is at least 75%, e.g., at least 80%, 85%, 90%, or 95% of the number of the referenced coding sequence.

[0633] The aldose reductases (ARs) can also include fused polypeptides or cleavable fusion polypeptides, as described supra.

[0634] In one embodiment, the host cell or fermenting organism (e.g., yeast cell) further comprises a heterologous polynucleotide encoding an L-arabinitol 4-dehydrogenase (LAD). A L-arabinitol 4-dehydrogenase, as used herein, provides enzymatic activity for converting L-arabitol to L-xylulose. The L-arabinitol 4-dehydrogenase may be any L-arabinitol 4-dehydrogenase that is suitable for the host cells and the methods described herein, such as a naturally occurring L-arabinitol 4-dehydrogenase or a variant thereof that retains L-arabinitol 4-dehydrogenase activity. In one embodiment, the L-arabinitol 4-dehydrogenase is present in the cytosol of the host cells.

[0635] In some embodiments, the host cells or fermenting organisms comprising a heterologous polynucleotide encoding a L-arabinitol 4-dehydrogenase (LAD) have an increased level of L-arabinitol 4-dehydrogenase activity compared to the host cells without the heterologous polynucleotide encoding the L-arabinitol 4-dehydrogenase, when cultivated under the same conditions. In some embodiments, the host cells have an increased level of L-arabinitol 4-dehydrogenase activity of at least 5%, e.g., at least 10%, at least 15%, at least 20%, at least 25%, at least 50%, at least 100%, at least 150%, at least 200%, at least 300%, or at 500% compared to the host cells without the heterologous polynucleotide encoding the L-arabinitol 4-dehydrogenase, when cultivated under the same conditions.

[0636] Exemplary L-arabinitol 4-dehydrogenases (LADs) that can be used with the host cells and fermenting organisms, and methods of use described herein include, but are not limited to, the Meyerozyma caribbica LAD of SEQ ID NO: 286, the Trichoderma reesei LAD of SEQ ID NO: 287, the Meyerozyma guilliermondii LAD of SEQ ID NO: 288, the Candida arabinofermentans LAD of SEQ ID NO: 289, the Candida carpophila LAD of SEQ ID NO: 290, the Talaromyces emersonii LAD of SEQ ID NO: 291, the Aspergillus oryzae LAD of SEQ ID NO: 292, the Neurospora crassa LAD of SEQ ID NO: 293, the Trichoderma reesei LAD of SEQ ID NO: 294, the Aspergillus niger LAD of SEQ ID NO: 295 and the Penicillium rubens LAD of SEQ ID NO: 296. Additional polynucleotides encoding suitable L-arabinitol 4-dehydrogenases may be obtained from microorganisms of any genus, including those readily available within the UniProtKB database. In one embodiment, the L-arabinitol 4-dehydrogenase is a bacterial, a yeast, or a filamentous fungal L-arabinitol 4-dehydrogenase, e.g., obtained from any of the microorganisms described or referenced herein, as described supra.

[0637] The L-arabinitol 4-dehydrogenase (LAD) coding sequences can also be used to design nucleic acid probes to identify and clone DNA encoding L-arabinitol 4-dehydrogenases from strains of different genera or species, as described supra.

[0638] The polynucleotides encoding L-arabinitol 4-dehydrogenases (LADs) may also be identified and obtained from other sources including microorganisms isolated from nature (e.g., soil, composts, water, etc.) or DNA samples obtained directly from natural materials (e.g., soil, composts, water, etc.) as described supra.

[0639] Techniques used to isolate or clone polynucleotides encoding L-arabinitol 4-dehydrogenases (LADs) are described supra.

[0640] In one embodiment, the L-arabinitol 4-dehydrogenase (LAD) has a mature polypeptide sequence of at least 60%, e.g., at least 65%, at least 70%, at least 75%, at least 80%, at least 85%, at least 90%, at least 91%, at least 92%, at least 93%, at least 94%, at least 95%, at least 96%, at least 97%, at least 98%, at least 99%, or 100% sequence identity to any L-arabinitol 4-dehydrogenase described or referenced herein (e.g., the L-arabinitol 4-dehydrogenase of SEQ ID NO: 286, 287, 288, 289, 290, 291, 292, 293, 294, 295 or 296). In one embodiment, the L-arabinitol 4-dehydrogenase has a mature polypeptide sequence that differs by no more than ten amino acids, e.g., by no more than five amino acids, by no more than four amino acids, by no more than three amino acids, by no more than two amino acids, or by one amino acid from any L-arabinitol 4-dehydrogenase described or referenced herein (e.g., the L-arabinitol 4-dehydrogenase of SEQ ID NO: 286, 287, 288, 289, 290, 291, 292, 293, 294, 295 or 296). In one embodiment, the L-arabinitol 4-dehydrogenase has a mature polypeptide sequence that comprises or consists of the amino acid sequence of any L-arabinitol 4-dehydrogenase described or referenced herein (e.g., the L-arabinitol 4-dehydrogenase of SEQ ID NO: 286, 287, 288, 289, 290, 291, 292, 293, 294, 295 or 296), allelic variant, or a fragment thereof having L-arabinitol 4-dehydrogenase activity. In one embodiment, the L-arabinitol 4-dehydrogenase has an amino acid substitution, deletion, and/or insertion of one or more (e.g., two, several) amino acids. In some embodiments, the total number of amino acid substitutions, deletions and/or insertions is not more than 10, e.g., not more than 9, 8, 7, 6, 5, 4, 3, 2, or 1.

[0641] In some embodiments, the L-arabinitol 4-dehydrogenase (LAD) has at least 20%, e.g., at least 40%, at least 50%, at least 60%, at least 70%, at least 80%, at least 90%, at least 95%, at least 96%, at least 97%, at least 98%, at least 99%, or 100% of the L-arabinitol 4-dehydrogenase activity of any L-arabinitol 4-dehydrogenase described or referenced herein (e.g., the L-arabinitol 4-dehydrogenase of SEQ ID NO: 286, 287, 288, 289, 290, 291, 292, 293, 294, 295 or 296) under the same conditions.

[0642] In one embodiment, the L-arabinitol 4-dehydrogenase (LAD) coding sequence hybridizes under at least low stringency conditions, e.g., medium stringency conditions, medium-high stringency conditions, high stringency conditions, or very high stringency conditions with the full-length complementary strand of the coding sequence from any L-arabinitol 4-dehydrogenase described or referenced herein (e.g., the L-arabinitol 4-dehydrogenase of SEQ ID NO: 286, 287, 288, 289, 290, 291, 292, 293, 294, 295 or 296). In one embodiment, the L-arabinitol 4-dehydrogenase coding sequence has at least 65%, e.g., at least 70%, at least 75%, at least 80%, at least 85%, at least 85%, at least 90%, at least 91%, at least 92%, at least 93%, at least 94%, at least 95%, at least 96%, at least 97%, at least 98%, at least 99%, or 100% sequence identity with the coding sequence from any L-arabinitol 4-dehydrogenase described or referenced herein (e.g., the L-arabinitol 4-dehydrogenase of SEQ ID NO: 286, 287, 288, 289, 290, 291, 292, 293, 294, 295 or 296).

[0643] In one embodiment, the heterologous polynucleotide encoding the L-arabinitol 4-dehydrogenase (LAD) comprises the coding sequence of any L-arabinitol 4-dehydrogenase described or referenced herein (e.g., the L-arabinitol 4-dehydrogenase of SEQ ID NO: 286, 287, 288, 289, 290, 291, 292, 293, 294, 295 or 296). In one embodiment, the heterologous polynucleotide encoding the L-arabinitol 4-dehydrogenase comprises a subsequence of the coding sequence from any L-arabinitol 4-dehydrogenase described or referenced herein, wherein the subsequence encodes a polypeptide having L-arabinitol 4-dehydrogenase activity. In one embodiment, the number of nucleotides residues in the subsequence is at least 75%, e.g., at least 80%, 85%, 90%, or 95% of the number of the referenced coding sequence.

[0644] The L-arabinitol 4-dehydrogenases (LADs) can also include fused polypeptides or cleavable fusion polypeptides, as described supra.

[0645] In one embodiment, the host cell or fermenting organism (e.g., yeast cell) further comprises a heterologous polynucleotide encoding a xylitol dehydrogenase (XDH). A xylitol dehydrogenase, as used herein, provides enzymatic activity for converting xylitol to D-xylulose. The xylitol dehydrogenase may be any xylitol dehydrogenase that is suitable for the host cells and the methods described herein, such as a naturally occurring xylitol dehydrogenase or a variant thereof that retains xylitol dehydrogenase activity. In one embodiment, the xylitol dehydrogenase is present in the cytosol of the host cells.

[0646] In some embodiments, the host cells or fermenting organisms comprising a heterologous polynucleotide encoding a xylitol dehydrogenase (XDH) have an increased level of xylitol dehydrogenase activity compared to the host cells without the heterologous polynucleotide encoding the xylitol dehydrogenase, when cultivated under the same conditions. In some embodiments, the host cells have an increased level of xylitol dehydrogenase activity of at least 5%, e.g., at least 10%, at least 15%, at least 20%, at least 25%, at least 50%, at least 100%, at least 150%, at least 200%, at least 300%, or at 500% compared to the host cells without the heterologous polynucleotide encoding the xylitol dehydrogenase, when cultivated under the same conditions.

[0647] Exemplary xylitol dehydrogenases (XDHs) that can be used with the host cells and fermenting organisms, and methods of use described herein include, but are not limited to, the Scheffersomyces stipitis xylitol dehydrogenase of SEQ ID NO: 309, the Trichoderma reesei xylitol dehydrogenase (Wang et al., 1998, Chin. J. Biotechnol. 14, 179-185), the Pichia stipitis xylitol dehydrogenase (Karhumaa et al, 2007, Microb Cell Fact. 6, 5), as well as other yeast xylitol dehydrogenases described in the art, such as XDHs from S. cerevisiae (Richard et. al., 1999, FEBS Letters 457, 135-138), C. didensiae, C. intermediae, C. parapsilosis, C. silvanoru, C. tropicalis, Kl. Marxsianus, P. guilliermondii, T. molishiama, Pa. tannophilus, and C. shehatae (Yablochkova et al, 2003, Microbiology 72(4), 414-417). Additional polynucleotides encoding suitable xylitol dehydrogenases may be obtained from microorganisms of any genus, including those readily available within the UniProtKB database. In one embodiment, the xylitol dehydrogenase is a bacterial, a yeast, or a filamentous fungal xylitol dehydrogenase, e.g., obtained from any of the microorganisms described or referenced herein, as described supra.

[0648] The xylitol dehydrogenase (XDH) coding sequences can also be used to design nucleic acid probes to identify and clone DNA encoding xylitol dehydrogenases from strains of different genera or species, as described supra.

[0649] The polynucleotides encoding xylitol dehydrogenases (XDHs) may also be identified and obtained from other sources including microorganisms isolated from nature (e.g., soil, composts, water, etc.) or DNA samples obtained directly from natural materials (e.g., soil, composts, water, etc.) as described supra.

[0650] Techniques used to isolate or clone polynucleotides encoding xylitol dehydrogenases (XDHs) are described supra.

[0651] In one embodiment, the xylitol dehydrogenase (XDH) has a mature polypeptide sequence of at least 60%, e.g., at least 65%, at least 70%, at least 75%, at least 80%, at least 85%, at least 90%, at least 91%, at least 92%, at least 93%, at least 94%, at least 95%, at least 96%, at least 97%, at least 98%, at least 99%, or 100% sequence identity to any xylitol dehydrogenase described or referenced herein (e.g., the Scheffersomyces stipitis xylitol dehydrogenase of SEQ ID NO: 309). In one embodiment, the xylitol dehydrogenase has a mature polypeptide sequence that differs by no more than ten amino acids, e.g., by no more than five amino acids, by no more than four amino acids, by no more than three amino acids, by no more than two amino acids, or by one amino acid from any xylitol dehydrogenase described or referenced herein (e.g., the Scheffersomyces stipitis xylitol dehydrogenase of SEQ ID NO: 309). In one embodiment, the xylitol dehydrogenase has a mature polypeptide sequence that comprises or consists of the amino acid sequence of any xylitol dehydrogenase described or referenced herein (e.g., the Scheffersomyces stipitis xylitol dehydrogenase of SEQ ID NO: 309), allelic variant, or a fragment thereof having xylitol dehydrogenase activity. In one embodiment, the xylitol dehydrogenase has an amino acid substitution, deletion, and/or insertion of one or more (e.g., two, several) amino acids. In some embodiments, the total number of amino acid substitutions, deletions and/or insertions is not more than 10, e.g., not more than 9, 8, 7, 6, 5, 4, 3, 2, or 1.

[0652] In some embodiments, the xylitol dehydrogenase (XDH) has at least 20%, e.g., at least 40%, at least 50%, at least 60%, at least 70%, at least 80%, at least 90%, at least 95%, at least 96%, at least 97%, at least 98%, at least 99%, or 100% of the xylitol dehydrogenase activity of any xylitol dehydrogenase described or referenced herein (e.g., the Scheffersomyces stipitis xylitol dehydrogenase of SEQ ID NO: 309) under the same conditions.

[0653] In one embodiment, the xylitol dehydrogenase (XDH) coding sequence hybridizes under at least low stringency conditions, e.g., medium stringency conditions, medium-high stringency conditions, high stringency conditions, or very high stringency conditions with the full-length complementary strand of the coding sequence from any xylitol dehydrogenase described or referenced herein (e.g., the Scheffersomyces stipitis xylitol dehydrogenase of SEQ ID NO: 309). In one embodiment, the xylitol dehydrogenase coding sequence has at least 65%, e.g., at least 70%, at least 75%, at least 80%, at least 85%, at least 85%, at least 90%, at least 91%, at least 92%, at least 93%, at least 94%, at least 95%, at least 96%, at least 97%, at least 98%, at least 99%, or 100% sequence identity with the coding sequence from any xylitol dehydrogenase described or referenced herein (e.g., the Scheffersomyces stipitis xylitol dehydrogenase of SEQ ID NO: 309).

[0654] In one embodiment, the heterologous polynucleotide encoding the xylitol dehydrogenase (XDH) comprises the coding sequence of any xylitol dehydrogenase described or referenced herein (e.g., the Scheffersomyces stipitis xylitol dehydrogenase of SEQ ID NO: 309). In one embodiment, the heterologous polynucleotide encoding the xylitol dehydrogenase comprises a subsequence of the coding sequence from any xylitol dehydrogenase described or referenced herein, wherein the subsequence encodes a polypeptide having xylitol dehydrogenase activity. In one embodiment, the number of nucleotides residues in the subsequence is at least 75%, e.g., at least 80%, 85%, 90%, or 95% of the number of the referenced coding sequence.

[0655] The xylitol dehydrogenases (XDHs) can also include fused polypeptides or cleavable fusion polypeptides, as described supra.

[0656] In one embodiment, the host cell or fermenting organism (e.g., yeast cell) further comprises a heterologous polynucleotide encoding a xylulokinase (XK). A xylulokinase, as used herein, provides enzymatic activity for converting D-xylulose to xylulose 5-phosphate. The xylulokinase may be any xylulokinase that is suitable for the host cells and the methods described herein, such as a naturally occurring xylulokinase or a variant thereof that retains xylulokinase activity. In one embodiment, the xylulokinase is present in the cytosol of the host cells.

[0657] In some embodiments, the host cells or fermenting organisms comprising a heterologous polynucleotide encoding a xylulokinase (XK) have an increased level of xylulokinase activity compared to the host cells without the heterologous polynucleotide encoding the xylulokinase, when cultivated under the same conditions. In some embodiments, the host cells have an increased level of xylulokinase activity of at least 5%, e.g., at least 10%, at least 15%, at least 20%, at least 25%, at least 50%, at least 100%, at least 150%, at least 200%, at least 300%, or at 500% compared to the host cells without the heterologous polynucleotide encoding the xylulokinase, when cultivated under the same conditions.

[0658] Exemplary xylulokinases (XKs) that can be used with the host cells and fermenting organisms, and methods of use described herein include, but are not limited to, the Saccharomyces cerevisiae xylulokinase of SEQ ID NO: 75, the Scheffersomyces stipitis xylulokinase of SEQ ID NO: 310 and the Aspergillus niger xylulokinase of SEQ ID NO: 311. Additional xylulokinases are known in the art. Additional polynucleotides encoding suitable xylulokinases may be obtained from microorganisms of any genus, including those readily available within the UniProtKB database. In one embodiment, the xylulokinases is a bacterial, a yeast, or a filamentous fungal xylulokinase, e.g., obtained from any of the microorganisms described or referenced herein, as described supra.

[0659] The xylulokinase (XK) coding sequences can also be used to design nucleic acid probes to identify and clone DNA encoding xylulokinases from strains of different genera or species, as described supra.

[0660] The polynucleotides encoding xylulokinases (XK) may also be identified and obtained from other sources including microorganisms isolated from nature (e.g., soil, composts, water, etc.) or DNA samples obtained directly from natural materials (e.g., soil, composts, water, etc.) as described supra.

[0661] Techniques used to isolate or clone polynucleotides encoding xylulokinases (XKs) are described supra.

[0662] In one embodiment, the xylulokinase (XK) has a mature polypeptide sequence of at least 60%, e.g., at least 65%, at least 70%, at least 75%, at least 80%, at least 85%, at least 90%, at least 91%, at least 92%, at least 93%, at least 94%, at least 95%, at least 96%, at least 97%, at least 98%, at least 99%, or 100% sequence identity to any xylulokinase described or referenced herein (e.g., the xylulokinase of SEQ ID NO: 75, 310 or 311). In one embodiment, the xylulokinase has a mature polypeptide sequence that differs by no more than ten amino acids, e.g., by no more than five amino acids, by no more than four amino acids, by no more than three amino acids, by no more than two amino acids, or by one amino acid from any xylulokinase described or referenced herein (e.g., the xylulokinase of SEQ ID NO: 75, 310 or 311). In one embodiment, the xylulokinase has a mature polypeptide sequence that comprises or consists of the amino acid sequence of any xylulokinase described or referenced herein (e.g., the xylulokinase of SEQ ID NO: 75, 310 or 311), allelic variant, or a fragment thereof having xylulokinase activity. In one embodiment, the xylulokinase has an amino acid substitution, deletion, and/or insertion of one or more (e.g., two, several) amino acids. In some embodiments, the total number of amino acid substitutions, deletions and/or insertions is not more than 10, e.g., not more than 9, 8, 7, 6, 5, 4, 3, 2, or 1.

[0663] In some embodiments, the xylulokinase (XK) has at least 20%, e.g., at least 40%, at least 50%, at least 60%, at least 70%, at least 80%, at least 90%, at least 95%, at least 96%, at least 97%, at least 98%, at least 99%, or 100% of the xylulokinase activity of any xylulokinase described or referenced herein (e.g., the xylulokinase of SEQ ID NO: 75, 310 or 311) under the same conditions.

[0664] In one embodiment, the xylulokinase (XK) coding sequence hybridizes under at least low stringency conditions, e.g., medium stringency conditions, medium-high stringency conditions, high stringency conditions, or very high stringency conditions with the full-length complementary strand of the coding sequence from any xylulokinase described or referenced herein (e.g., the xylulokinase of SEQ ID NO: 75, 310 or 311). In one embodiment, the xylulokinase coding sequence has at least 65%, e.g., at least 70%, at least 75%, at least 80%, at least 85%, at least 85%, at least 90%, at least 91%, at least 92%, at least 93%, at least 94%, at least 95%, at least 96%, at least 97%, at least 98%, at least 99%, or 100% sequence identity with the coding sequence from any xylulokinase described or referenced herein (e.g., the xylulokinase of SEQ ID NO: 75, 310 or 311).

[0665] In one embodiment, the heterologous polynucleotide encoding the xylulokinase (XK) comprises the coding sequence of any xylulokinase described or referenced herein (e.g., the xylulokinase of SEQ ID NO: 75, 310 or 311). In one embodiment, the heterologous polynucleotide encoding the xylulokinase comprises a subsequence of the coding sequence from any xylulokinase described or referenced herein, wherein the subsequence encodes a polypeptide having xylulokinase activity. In one embodiment, the number of nucleotides residues in the subsequence is at least 75%, e.g., at least 80%, 85%, 90%, or 95% of the number of the referenced coding sequence.

[0666] The xylulokinases (XKs) can also include fused polypeptides or cleavable fusion polypeptides, as described supra.

[0667] In some embodiments, the host cells or fermenting organisms described herein have an active arabinose fermentation pathway known as the “bacterial pathway” which utilizes genes L-arabinose isomerase (AI, such as araA), L-ribulokinase (RK, such as araB), and L-ribulose-5-P4-epimerase (R5PE, such as araD) to convert L-arabinose to D-xylulose 5-phosphate. This and other exemplary arabinose fermentation pathways are known in the art (e.g., WO2002/066616; WO2003/095627; WO2007/143245; WO2008/041840; WO2009/011591; WO2010/151548; WO2011/003893; WO2011/131674; WO2012/143513; US2012/225464; U.S. Pat. No. 7,977,083). Any arabinose fermentation pathway or gene thereof described in the foregoing references is incorporated herein by reference for use in Applicant's active arabinose fermentation pathway.

[0668] In one aspect, the recombinant cells described herein have improved anaerobic growth on a pentose (e.g., xylose and/or arabinose). In one embodiment, the recombinant cell is capable of higher anaerobic growth rate on a pentose (e.g., xylose and/or arabinose) compared to the same cell without the active pentose fermentation pathway.

[0669] In one aspect, the recombinant cells described herein have improved rate of pentose consumption (e.g., xylose and/or arabinose). In one embodiment, the recombinant cell is capable of higher rate of pentose consumption (e.g., xylose and/or arabinose) compared to the same cell without the active pentose fermentation pathway. In one embodiment, the rate of pentose consumption (e.g., xylose and/or arabinose) is at least 5%, e.g., at least 10%, 15%, 20%, 25%, 30%, 35%, 40%, 45%, 50%, 60%, 75% or 90% higher compared to the same cell without the active pentose fermentation pathway.

[0670] In one aspect, the recombinant cells described herein have higher pentose (e.g., xylose and/or arabinose) consumption. In one embodiment, the recombinant cell is capable of higher pentose (e.g., xylose and/or arabinose) consumption compared to the same cell without the active pentose fermentation pathway at about or after 120 hours fermentation (e.g., under conditions described in the examples herein). In one embodiment, the recombinant cell is capable of consuming more than 65%, e.g., at least 70%, 75%, 80%, 85%, 90%, 95% of pentose (e.g., xylose and/or arabinose) in the medium at about or after 120 hours fermentation (e.g., under conditions described in the examples herein).

### Gene Disruptions

[0671] The host cells and fermenting organisms described herein may also comprise one or more (e.g., two, several) gene disruptions, e.g., to divert sugar metabolism from undesired products to ethanol. In some embodiments, the recombinant host cells produce a greater amount of ethanol compared to the cell without the one or more disruptions when cultivated under identical conditions. In some embodiments, one or more of the disrupted endogenous genes is inactivated. In some embodiments, the host cell or fermenting organism is a diploid and has a disruption (e.g., inactivation) of both copies of the referenced gene.

[0672] In certain embodiments, the host cell or fermenting organism provided herein comprises a disruption of one or more endogenous genes encoding enzymes involved in producing alternate fermentative products such as glycerol or other byproducts such as acetate or diols. For example, the cells provided herein may comprise a disruption of one or more endogenous genes encoding a glycerol 3-phosphatase (GPP, E.C. 3.1.3.21, catalyzes conversion of glycerol-3 phosphate to glycerol), a glycerol 3-phosphate dehydrogenase (GPD, catalyzes reaction of dihydroxyacetone phosphate to glycerol 3-phosphate), glycerol kinase (catalyzes conversion of glycerol 3-phosphate to glycerol), dihydroxyacetone kinase (catalyzes conversion of dihydroxyacetone phosphate to dihydroxyacetone), glycerol dehydrogenase (catalyzes conversion of dihydroxyacetone to glycerol), and aldehyde dehydrogenase (ALD, e.g., converts acetaldehyde to acetate).

[0673] In some embodiments, the host cell or fermenting organism comprises a disruption to one or more endogenous genes encoding a glycerol 3-phosphatase (GPP). Saccharomyces cerevisiae has two glycerol-3-phosphate phosphatase paralogs encoding GPP1 (UniProt No. P41277; SEQ ID NO: 257) and GPP2 (UniProt No. P40106; SEQ ID NO: 258) (Pahlman et al. (2001) J. Biol. Chem. 276(5):3555-63; Norbeck et al. (1996) J. Biol. Chem. 271(23):13875-81). In some embodiments, the host cell or fermenting organism comprises a disruption to GPP1. In some embodiments, the host cell or fermenting organism comprises a disruption to GPP2. In some embodiments, the host cell or fermenting organism comprises a disruption to GPP1 and GPP2.

[0674] In some embodiments, the host cell or fermenting organism comprises a disruption to one or more endogenous genes encoding a glycerol 3-phosphate dehydrogenase (GPD). Saccharomyces cerevisiae has two glycerol 3-phosphate dehydrogenases which encode GPD1 (UniProt No. Q00055; SEQ ID NO: 259) and GPD2 (UniProt No. P41911; SEQ ID NO: 260). In some embodiments, the host cell or fermenting organism comprises a disruption to GPD1. In some embodiments, the host cell or fermenting organism comprises a disruption to GPD2. In some embodiments, the host cell or fermenting organism comprises a disruption to GPD1 and GPD2.

[0675] In some embodiments, the host cell or fermenting organism comprises a disruption to an endogenous gene encoding GPP (e.g., GPP1 and/or GPP2) and/or a GPD (GPD1 and/or GPD2), wherein the host cell or fermenting organism produces a decreased amount of glycerol (e.g., at least 25% less, at least 50% less, at least 60% less, at least 70% less, at least 80% less, or at least 90% less) compared to the cell without the disruption to the endogenous gene encoding the GPP and/or GPD when cultivated under identical conditions.

[0676] Modeling analysis can be used to design gene disruptions that additionally optimize utilization of the pathway. One exemplary computational method for identifying and designing metabolic alterations favoring biosynthesis of a desired product is the OptKnock computational framework, Burgard et al., 2003, Biotechnol. Bioeng. 84: 647-657.

[0677] The host cells and fermenting organisms comprising a gene disruption may be constructed using methods well known in the art, including those methods described herein. A portion of the gene can be disrupted such as the coding region or a control sequence required for expression of the coding region. Such a control sequence of the gene may be a promoter sequence or a functional part thereof, i.e., a part that is sufficient for affecting expression of the gene. For example, a promoter sequence may be inactivated resulting in no expression or a weaker promoter may be substituted for the native promoter sequence to reduce expression of the coding sequence. Other control sequences for possible modification include, but are not limited to, a leader, propeptide sequence, signal sequence, transcription terminator, and transcriptional activator.

[0678] The host cells and fermenting organisms comprising a gene disruption may be constructed by gene deletion techniques to eliminate or reduce expression of the gene. Gene deletion techniques enable the partial or complete removal of the gene thereby eliminating their expression. In such methods, deletion of the gene is accomplished by homologous recombination using a plasmid that has been constructed to contiguously contain the 5′ and 3′ regions flanking the gene.

[0679] The host cells and fermenting organisms comprising a gene disruption may also be constructed by introducing, substituting, and/or removing one or more (e.g., two, several) nucleotides in the gene or a control sequence thereof required for the transcription or translation thereof. For example, nucleotides may be inserted or removed for the introduction of a stop codon, the removal of the start codon, or a frame-shift of the open reading frame. Such a modification may be accomplished by site-directed mutagenesis or PCR generated mutagenesis in accordance with methods known in the art. See, for example, Botstein and Shortle, 1985, Science 229: 4719; Lo et al., 1985, Proc. Natl. Acad. Sci. U.S.A. 81: 2285; Higuchi et al., 1988, Nucleic Acids Res 16: 7351; Shimada, 1996, Meth. Mol. Biol. 57: 157; Ho et al., 1989, Gene 77: 61; Horton et al., 1989, Gene 77: 61; and Sarkar and Sommer, 1990, BioTechniques 8: 404.

[0680] The host cells and fermenting organisms comprising a gene disruption may also be constructed by inserting into the gene a disruptive nucleic acid construct comprising a nucleic acid fragment homologous to the gene that will create a duplication of the region of homology and incorporate construct DNA between the duplicated regions. Such a gene disruption can eliminate gene expression if the inserted construct separates the promoter of the gene from the coding region or interrupts the coding sequence such that a non-functional gene product results. A disrupting construct may be simply a selectable marker gene accompanied by 5′ and 3′ regions homologous to the gene. The selectable marker enables identification of transformants containing the disrupted gene.

[0681] The host cells and fermenting organisms comprising a gene disruption may also be constructed by the process of gene conversion (see, for example, Iglesias and Trautner, 1983, Molecular General Genetics 189: 73-76). For example, in the gene conversion method, a nucleotide sequence corresponding to the gene is mutagenized in vitro to produce a defective nucleotide sequence, which is then transformed into the recombinant strain to produce a defective gene. By homologous recombination, the defective nucleotide sequence replaces the endogenous gene. It may be desirable that the defective nucleotide sequence also comprises a marker for selection of transformants containing the defective gene.

[0682] The host cells and fermenting organisms comprising a gene disruption may be further constructed by random or specific mutagenesis using methods well known in the art, including, but not limited to, chemical mutagenesis (see, for example, Hopwood, The Isolation of Mutants in Methods in Microbiology (J. R. Norris and D. W. Ribbons, eds.) pp. 363-433, Academic Press, New York, 1970). Modification of the gene may be performed by subjecting the parent strain to mutagenesis and screening for mutant strains in which expression of the gene has been reduced or inactivated. The mutagenesis, which may be specific or random, may be performed, for example, by use of a suitable physical or chemical mutagenizing agent, use of a suitable oligonucleotide, or subjecting the DNA sequence to PCR generated mutagenesis. Furthermore, the mutagenesis may be performed by use of any combination of these mutagenizing methods.

[0683] Examples of a physical or chemical mutagenizing agent suitable for the present purpose include ultraviolet (UV) irradiation, hydroxylamine, N-methyl-N′-nitro-N-nitrosoguanidine (MNNG), N-methyl-N′-nitrosogaunidine (NTG) O-methyl hydroxylamine, nitrous acid, ethyl methane sulphonate (EMS), sodium bisulphite, formic acid, and nucleotide analogues. When such agents are used, the mutagenesis is typically performed by incubating the parent strain to be mutagenized in the presence of the mutagenizing agent of choice under suitable conditions, and selecting for mutants exhibiting reduced or no expression of the gene.

[0684] A nucleotide sequence homologous or complementary to a gene described herein may be used from other microbial sources to disrupt the corresponding gene in a recombinant strain of choice.

[0685] In one embodiment, the modification of a gene in the recombinant cell is unmarked with a selectable marker. Removal of the selectable marker gene may be accomplished by culturing the mutants on a counter-selection medium. Where the selectable marker gene contains repeats flanking its 5′ and 3′ ends, the repeats will facilitate the looping out of the selectable marker gene by homologous recombination when the mutant strain is submitted to counter-selection. The selectable marker gene may also be removed by homologous recombination by introducing into the mutant strain a nucleic acid fragment comprising 5′ and 3′ regions of the defective gene, but lacking the selectable marker gene, followed by selecting on the counter-selection medium. By homologous recombination, the defective gene containing the selectable marker gene is replaced with the nucleic acid fragment lacking the selectable marker gene. Other methods known in the art may also be used.

### Methods Using a Starch-Containing Material

[0686] In some embodiments, the methods described herein produce a fermentation product from a starch-containing material. Starch-containing material is well-known in the art, containing two types of homopolysaccharides (amylose and amylopectin) and is linked by alpha-(1-4)-D-glycosidic bonds. Any suitable starch-containing starting material may be used. The starting material is generally selected based on the desired fermentation product, such as ethanol. Examples of starch-containing starting materials include cereal, tubers or grains. Specifically, the starch-containing material may be corn, wheat, barley, rye, milo, sago, cassava, tapioca, sorghum, oat, rice, peas, beans, or sweet potatoes, or mixtures thereof. Contemplated are also waxy and non-waxy types of corn and barley.

[0687] In one embodiment, the starch-containing starting material is corn. In one embodiment, the starch-containing starting material is wheat. In one embodiment, the starch-containing starting material is barley. In one embodiment, the starch-containing starting material is rye. In one embodiment, the starch-containing starting material is milo. In one embodiment, the starch-containing starting material is sago. In one embodiment, the starch-containing starting material is cassava. In one embodiment, the starch-containing starting material is tapioca. In one embodiment, the starch-containing starting material is sorghum. In one embodiment, the starch-containing starting material is rice. In one embodiment, the starch-containing starting material is peas. In one embodiment, the starch-containing starting material is beans. In one embodiment, the starch-containing starting material is sweet potatoes. In one embodiment, the starch-containing starting material is oats.

[0688] The methods using a starch-containing material may include a conventional process (e.g., including a liquefaction step described in more detail below) or a raw starch hydrolysis process. In some embodiments using a starch-containing material, saccharification of the starch-containing material is at a temperature above the initial gelatinization temperature. In some embodiments using a starch-containing material, saccharification of the starch-containing material is at a temperature below the initial gelatinization temperature.

### Liquefaction

[0689] In embodiments using a starch-containing material, the methods may further comprise a liquefaction step carried out by subjecting the starch-containing material at a temperature above the initial gelatinization temperature to an alpha-amylase and optionally a protease and/or a glucoamylase. Other enzymes such as a pullulanase and phytase may also be present and/or added in liquefaction. In some embodiments, the liquefaction step is carried out prior to steps a) and b) of the described methods.

[0690] Liquefaction step may be carried out for 0.5-5 hours, such as 1-3 hours, such as typically about 2 hours.

[0691] The term “initial gelatinization temperature” means the lowest temperature at which gelatinization of the starch-containing material commences. In general, starch heated in water begins to gelatinize between about 50° C. and 75° C.; the exact temperature of gelatinization depends on the specific starch and can readily be determined by the skilled artisan. Thus, the initial gelatinization temperature may vary according to the plant species, to the particular variety of the plant species as well as with the growth conditions. The initial gelatinization temperature of a given starch-containing material may be determined as the temperature at which birefringence is lost in 5% of the starch granules using the method described by Gorinstein and Lii, 1992, Starch/Stärke 44(12): 461-466.

[0692] Liquefaction is typically carried out at a temperature in the range from 70-100° C. In one embodiment, the temperature in liquefaction is between 75-95° C., such as between 75-90° C., between 80-90° C., or between 82-88° C., such as about 85° C.

[0693] A jet-cooking step may be carried out prior to liquefaction in step, for example, at a temperature between 110-145° C., 120-140° C., 125-135° C., or about 130° C. for about 1-15 minutes, for about 3-10 minutes, or about 5 minutes.

[0694] The pH during liquefaction may be between 4 and 7, such as pH 4.5-6.5, pH 5.0-6.5, pH 5.0-6.0, pH 5.2-6.2, or about 5.2, about 5.4, about 5.6, or about 5.8.

[0695] In one embodiment, the process further comprises, prior to liquefaction, the steps of:
[0696] i) reducing the particle size of the starch-containing material, preferably by dry milling;
[0697] ii) forming a slurry comprising the starch-containing material and water.

[0698] The starch-containing starting material, such as whole grains, may be reduced in particle size, e.g., by milling, in order to open up the structure, to increase surface area, and allowing for further processing. Generally, there are two types of processes: wet and dry milling. In dry milling whole kernels are milled and used. Wet milling gives a good separation of germ and meal (starch granules and protein). Wet milling is often applied at locations where the starch hydrolysate is used in production of, e.g., syrups. Both dry milling and wet milling are well known in the art of starch processing. In one embodiment the starch-containing material is subjected to dry milling. In one embodiment, the particle size is reduced to between 0.05 to 3.0 mm, e.g., 0.1-0.5 mm, or so that at least 30%, at least 50%, at least 70%, or at least 90% of the starch-containing material fit through a sieve with a 0.05 to 3.0 mm screen, e.g., 0.1-0.5 mm screen. In another embodiment, at least 50%, e.g., at least 70%, at least 80%, or at least 90% of the starch-containing material fit through a sieve with #6 screen.

[0699] The aqueous slurry may contain from 10-55 w/w-% dry solids (DS), e.g., 25-45 w/w-% dry solids (DS), or 30-40 w/w-% dry solids (DS) of starch-containing material.

[0700] The alpha-amylase, optionally a protease, and optionally a glucoamylase may initially be added to the aqueous slurry to initiate liquefaction (thinning). In one embodiment, only a portion of the enzymes (e.g., about ⅓) is added to the aqueous slurry, while the rest of the enzymes (e.g., about ⅔) are added during liquefaction step.

[0701] A non-exhaustive list of alpha-amylases used in liquefaction can be found in the “Alpha-Amylases” section. Examples of suitable proteases used in liquefaction include any protease described supra in the “Proteases” section. Examples of suitable glucoamylases used in liquefaction include any glucoamylase found in the “Glucoamylases” section.

### Saccharification and Fermentation of Starch-Containing Material

[0702] In embodiments using a starch-containing material, a glucoamylase may be present and/or added in saccharification step a) and/or fermentation step b) or simultaneous saccharification and fermentation (SSF). The glucoamylase of the saccharification step a) and/or fermentation step b) or simultaneous saccharification and fermentation (SSF) is typically different from the glucoamylase optionally added to any liquefaction step described supra. In one embodiment, the glucoamylase is present and/or added together with a fungal alpha-amylase.

[0703] In some embodiments, the host cell or fermenting organism comprises a heterologous polynucleotide encoding a glucoamylase, for example, as described in WO2017/087330, the content of which is hereby incorporated by reference.

[0704] Examples of glucoamylases can be found in the “Glucoamylases” section.

[0705] When doing sequential saccharification and fermentation, saccharification step a) may be carried out under conditions well-known in the art. For instance, saccharification step a) may last up to from about 24 to about 72 hours. In one embodiment, pre-saccharification is done. Pre-saccharification is typically done for 40-90 minutes at a temperature between 30-65° C., typically about 60° C. Pre-saccharification is, in one embodiment, followed by saccharification during fermentation in simultaneous saccharification and fermentation (SSF). Saccharification is typically carried out at temperatures from 20-75° C., preferably from 40-70° C., typically about 60° C., and typically at a pH between 4 and 5, such as about pH 4.5.

[0706] Fermentation is carried out in a fermentation medium, as known in the art and, e.g., as described herein. The fermentation medium includes the fermentation substrate, that is, the carbohydrate source that is metabolized by the fermenting organism. With the processes described herein, the fermentation medium may comprise nutrients and growth stimulator(s) for the fermenting organism(s). Nutrient and growth stimulators are widely used in the art of fermentation and include nitrogen sources, such as ammonia; urea, vitamins and minerals, or combinations thereof.

[0707] Generally, fermenting organisms such as yeast, including Saccharomyces cerevisiae yeast, require an adequate source of nitrogen for propagation and fermentation. Many sources of supplemental nitrogen, if necessary, can be used and such sources of nitrogen are well known in the art. The nitrogen source may be organic, such as urea, DDGs, wet cake or corn mash, or inorganic, such as ammonia or ammonium hydroxide. In one embodiment, the nitrogen source is urea.

[0708] Fermentation can be carried out under low nitrogen conditions, e.g., when using a protease-expressing yeast. In some embodiments, the fermentation step is conducted with less than 1000 ppm supplemental nitrogen (e.g., urea or ammonium hydroxide), such as less than 750 ppm, less than 500 ppm, less than 400 ppm, less than 300 ppm, less than 250 ppm, less than 200 ppm, less than 150 ppm, less than 100 ppm, less than 75 ppm, less than 50 ppm, less than 25 ppm, or less than 10 ppm, supplemental nitrogen. In some embodiments, the fermentation step is conducted with no supplemental nitrogen.

[0709] Simultaneous saccharification and fermentation (“SSF”) is widely used in industrial scale fermentation product production processes, especially ethanol production processes. When doing SSF the saccharification step a) and the fermentation step b) are carried out simultaneously. There is no holding stage for the saccharification, meaning that a fermenting organism, such as yeast, and enzyme(s), may be added together. However, it is also contemplated to add the fermenting organism and enzyme(s) separately. SSF is typically carried out at a temperature from 25° C. to 40° C., such as from 28° C. to 35° C., such as from 30° C. to 34° C., or about 32° C. In one embodiment, fermentation is ongoing for 6 to 120 hours, in particular 24 to 96 hours. In one embodiment, the pH is between 4-5.

[0710] In one embodiment, a cellulolytic enzyme composition is present and/or added in saccharification, fermentation or simultaneous saccharification and fermentation (SSF). Examples of such cellulolytic enzyme compositions can be found in the “Cellulolytic Enzymes and Compositions” section. The cellulolytic enzyme composition may be present and/or added together with a glucoamylase, such as one disclosed in the “Glucoamylases” section.

### Methods Using a Cellulosic-Containing Material

[0711] In some embodiments, the methods described herein produce a fermentation product from a cellulosic-containing material. The predominant polysaccharide in the primary cell wall of biomass is cellulose, the second most abundant is hemicellulose, and the third is pectin. The secondary cell wall, produced after the cell has stopped growing, also contains polysaccharides and is strengthened by polymeric lignin covalently cross-linked to hemicellulose. Cellulose is a homopolymer of anhydrocellobiose and thus a linear beta-(1-4)-D-glucan, while hemicelluloses include a variety of compounds, such as xylans, xyloglucans, arabinoxylans, and mannans in complex branched structures with a spectrum of substituents. Although generally polymorphous, cellulose is found in plant tissue primarily as an insoluble crystalline matrix of parallel glucan chains. Hemicelluloses usually hydrogen bond to cellulose, as well as to other hemicelluloses, which help stabilize the cell wall matrix.

[0712] Cellulose is generally found, for example, in the stems, leaves, hulls, husks, and cobs of plants or leaves, branches, and wood of trees. The cellulosic-containing material can be, but is not limited to, agricultural residue, herbaceous material (including energy crops), municipal solid waste, pulp and paper mill residue, waste paper, and wood (including forestry residue) (see, for example, Wiselogel et al., 1995, in Handbook on Bioethanol (Charles E. Wyman, editor), pp. 105-118, Taylor & Francis, Washington D.C.; Wyman, 1994, Bioresource Technology 50: 3-16; Lynd, 1990, Applied Biochemistry and Biotechnology 24/25: 695-719; Mosier et al., 1999, Recent Progress in Bioconversion of Lignocellulosics, in Advances in Biochemical Engineering/Biotechnology, T. Scheper, managing editor, Volume 65, pp. 23-40, Springer-Verlag, New York). It is understood herein that the cellulose may be in the form of lignocellulose, a plant cell wall material containing lignin, cellulose, and hemicellulose in a mixed matrix. In one embodiment, the cellulosic-containing material is any biomass material. In another embodiment, the cellulosic-containing material is lignocellulose, which comprises cellulose, hemicelluloses, and lignin.

[0713] In one embodiment, the cellulosic-containing material is agricultural residue, herbaceous material (including energy crops), municipal solid waste, pulp and paper mill residue, waste paper, or wood (including forestry residue).

[0714] In another embodiment, the cellulosic-containing material is arundo, bagasse, bamboo, corn cob, corn fiber, corn stover, miscanthus, rice straw, switchgrass, or wheat straw.

[0715] In another embodiment, the cellulosic-containing material is aspen, eucalyptus, fir, pine, poplar, spruce, or willow.

[0716] In another embodiment, the cellulosic-containing material is algal cellulose, bacterial cellulose, cotton linter, filter paper, microcrystalline cellulose (e.g., AVICEL®), or phosphoric-acid treated cellulose.

[0717] In another embodiment, the cellulosic-containing material is an aquatic biomass. As used herein the term “aquatic biomass” means biomass produced in an aquatic environment by a photosynthesis process. The aquatic biomass can be algae, emergent plants, floating-leaf plants, or submerged plants.

[0718] The cellulosic-containing material may be used as is or may be subjected to pretreatment, using conventional methods known in the art, as described herein. In a preferred embodiment, the cellulosic-containing material is pretreated.

[0719] The methods of using cellulosic-containing material can be accomplished using methods conventional in the art. Moreover, the methods of can be implemented using any conventional biomass processing apparatus configured to carry out the processes.

### Cellulosic Pretreatment

[0720] In one embodiment the cellulosic-containing material is pretreated before saccharification.

[0721] In practicing the processes described herein, any pretreatment process known in the art can be used to disrupt plant cell wall components of the cellulosic-containing material (Chandra et al., 2007, Adv. Biochem. Engin./Biotechnol. 108: 67-93; Galbe and Zacchi, 2007, Adv. Biochem. Engin./Biotechnol. 108: 41-65; Hendriks and Zeeman, 2009, Bioresource Technology 100: 10-18; Mosier et al., 2005, Bioresource Technology 96: 673-686; Taherzadeh and Karimi, 2008, Int. J. Mol. Sci. 9: 1621-1651; Yang and Wyman, 2008, Biofuels Bioproducts and Biorefining-Biofpr. 2: 26-40).

[0722] The cellulosic-containing material can also be subjected to particle size reduction, sieving, pre-soaking, wetting, washing, and/or conditioning prior to pretreatment using methods known in the art.

[0723] Conventional pretreatments include, but are not limited to, steam pretreatment (with or without explosion), dilute acid pretreatment, hot water pretreatment, alkaline pretreatment, lime pretreatment, wet oxidation, wet explosion, ammonia fiber explosion, organosolv pretreatment, and biological pretreatment. Additional pretreatments include ammonia percolation, ultrasound, electroporation, microwave, supercritical CO₂, supercritical H₂O, ozone, ionic liquid, and gamma irradiation pretreatments.

[0724] In a one embodiment, the cellulosic-containing material is pretreated before saccharification (i.e., hydrolysis) and/or fermentation. Pretreatment is preferably performed prior to the hydrolysis. Alternatively, the pretreatment can be carried out simultaneously with enzyme hydrolysis to release fermentable sugars, such as glucose, xylose, and/or cellobiose. In most cases the pretreatment step itself results in some conversion of biomass to fermentable sugars (even in absence of enzymes).

[0725] In one embodiment, the cellulosic-containing material is pretreated with steam. In steam pretreatment, the cellulosic-containing material is heated to disrupt the plant cell wall components, including lignin, hemicellulose, and cellulose to make the cellulose and other fractions, e.g., hemicellulose, accessible to enzymes. The cellulosic-containing material is passed to or through a reaction vessel where steam is injected to increase the temperature to the required temperature and pressure and is retained therein for the desired reaction time. Steam pretreatment is preferably performed at 140-250° C., e.g., 160-200° C. or 170-190° C., where the optimal temperature range depends on optional addition of a chemical catalyst. Residence time for the steam pretreatment is preferably 1-60 minutes, e.g., 1-30 minutes, 1-20 minutes, 3-12 minutes, or 4-10 minutes, where the optimal residence time depends on the temperature and optional addition of a chemical catalyst. Steam pretreatment allows for relatively high solids loadings, so that the cellulosic-containing material is generally only moist during the pretreatment. The steam pretreatment is often combined with an explosive discharge of the material after the pretreatment, which is known as steam explosion, that is, rapid flashing to atmospheric pressure and turbulent flow of the material to increase the accessible surface area by fragmentation (Duff and Murray, 1996, Bioresource Technology 855: 1-33; Galbe and Zacchi, 2002, Appl. Microbiol. Biotechnol. 59: 618-628; U.S. Patent Application No. 2002/0164730). During steam pretreatment, hemicellulose acetyl groups are cleaved and the resulting acid autocatalyzes partial hydrolysis of the hemicellulose to monosaccharides and oligosaccharides. Lignin is removed to only a limited extent.

[0726] In one embodiment, the cellulosic-containing material is subjected to a chemical pretreatment. The term “chemical treatment” refers to any chemical pretreatment that promotes the separation and/or release of cellulose, hemicellulose, and/or lignin. Such a pretreatment can convert crystalline cellulose to amorphous cellulose. Examples of suitable chemical pretreatment processes include, for example, dilute acid pretreatment, lime pretreatment, wet oxidation, ammonia fiber/freeze expansion (AFEX), ammonia percolation (APR), ionic liquid, and organosolv pretreatments.

[0727] A chemical catalyst such as H₂SO₄ or SO₂ (typically 0.3 to 5% w/w) is sometimes added prior to steam pretreatment, which decreases the time and temperature, increases the recovery, and improves enzymatic hydrolysis (Ballesteros et al., 2006, Appl. Biochem. Biotechnol. 129-132: 496-508; Varga et al., 2004, Appl. Biochem. Biotechnol. 113-116: 509-523; Sassner et al., 2006, Enzyme Microb. Technol. 39: 756-762). In dilute acid pretreatment, the cellulosic-containing material is mixed with dilute acid, typically H₂SO₄, and water to form a slurry, heated by steam to the desired temperature, and after a residence time flashed to atmospheric pressure. The dilute acid pretreatment can be performed with a number of reactor designs, e.g., plug-flow reactors, counter-current reactors, or continuous counter-current shrinking bed reactors (Duff and Murray, 1996, Bioresource Technology 855: 1-33; Schell et al., 2004, Bioresource Technology 91: 179-188; Lee et al., 1999, Adv. Biochem. Eng. Biotechnol. 65: 93-115). In a specific embodiment the dilute acid pretreatment of cellulosic-containing material is carried out using 4% w/w sulfuric acid at 180° C. for 5 minutes.

[0728] Several methods of pretreatment under alkaline conditions can also be used. These alkaline pretreatments include, but are not limited to, sodium hydroxide, lime, wet oxidation, ammonia percolation (APR), and ammonia fiber/freeze expansion (AFEX) pretreatment. Lime pretreatment is performed with calcium oxide or calcium hydroxide at temperatures of 85-150° C. and residence times from 1 hour to several days (Wyman et al., 2005, Bioresource Technology 96: 1959-1966; Mosier et al., 2005, Bioresource Technology 96: 673-686). WO2006/110891, WO2006/110899, WO2006/110900, and WO2006/110901 disclose pretreatment methods using ammonia.

[0729] Wet oxidation is a thermal pretreatment performed typically at 180-200° C. for 5-15 minutes with addition of an oxidative agent such as hydrogen peroxide or over-pressure of oxygen (Schmidt and Thomsen, 1998, Bioresource Technology 64: 139-151; Palonen et al., 2004, Appl. Biochem. Biotechnol. 117: 1-17; Varga et al., 2004, Biotechnol. Bioeng. 88: 567-574; Martin et al., 2006, J. Chem. Technol. Biotechnol. 81: 1669-1677). The pretreatment is performed preferably at 1-40% dry matter, e.g., 2-30% dry matter or 5-20% dry matter, and often the initial pH is increased by the addition of alkali such as sodium carbonate.

[0730] A modification of the wet oxidation pretreatment method, known as wet explosion (combination of wet oxidation and steam explosion) can handle dry matter up to 30%. In wet explosion, the oxidizing agent is introduced during pretreatment after a certain residence time. The pretreatment is then ended by flashing to atmospheric pressure (WO2006/032282).

[0731] Ammonia fiber expansion (AFEX) involves treating the cellulosic-containing material with liquid or gaseous ammonia at moderate temperatures such as 90-150° C. and high pressure such as 17-20 bar for 5-10 minutes, where the dry matter content can be as high as 60% (Gollapalli et al., 2002, Appl. Biochem. Biotechnol. 98: 23-35; Chundawat et al., 2007, Biotechnol. Bioeng. 96: 219-231; Alizadeh et al., 2005, Appl. Biochem. Biotechnol. 121: 1133-1141; Teymouri et al., 2005, Bioresource Technology 96: 2014-2018). During AFEX pretreatment cellulose and hemicelluloses remain relatively intact. Lignin-carbohydrate complexes are cleaved.

[0732] Organosolv pretreatment delignifies the cellulosic-containing material by extraction using aqueous ethanol (40-60% ethanol) at 160-200° C. for 30-60 minutes (Pan et al., 2005, Biotechnol. Bioeng. 90: 473-481; Pan et al., 2006, Biotechnol. Bioeng. 94: 851-861; Kurabi et al., 2005, Appl. Biochem. Biotechnol. 121: 219-230). Sulphuric acid is usually added as a catalyst. In organosolv pretreatment, the majority of hemicellulose and lignin is removed.

[0733] Other examples of suitable pretreatment methods are described by Schell et al., 2003, Appl. Biochem. Biotechnol. 105-108: 69-85, and Mosier et al., 2005, Bioresource Technology 96: 673-686, and US2002/0164730.

[0734] In one embodiment, the chemical pretreatment is carried out as a dilute acid treatment, and more preferably as a continuous dilute acid treatment. The acid is typically sulfuric acid, but other acids can also be used, such as acetic acid, citric acid, nitric acid, phosphoric acid, tartaric acid, succinic acid, hydrogen chloride, or mixtures thereof. Mild acid treatment is conducted in the pH range of preferably 1-5, e.g., 1-4 or 1-2.5. In one embodiment, the acid concentration is in the range from preferably 0.01 to 10 wt. % acid, e.g., 0.05 to 5 wt. % acid or 0.1 to 2 wt. % acid. The acid is contacted with the cellulosic-containing material and held at a temperature in the range of preferably 140-200° C., e.g., 165-190° C., for periods ranging from 1 to 60 minutes.

[0735] In another embodiment, pretreatment takes place in an aqueous slurry. In preferred embodiments, the cellulosic-containing material is present during pretreatment in amounts preferably between 10-80 wt. %, e.g., 20-70 wt. % or 30-60 wt. %, such as around 40 wt. %. The pretreated cellulosic-containing material can be unwashed or washed using any method known in the art, e.g., washed with water.

[0736] In one embodiment, the cellulosic-containing material is subjected to mechanical or physical pretreatment. The term “mechanical pretreatment” or “physical pretreatment” refers to any pretreatment that promotes size reduction of particles. For example, such pretreatment can involve various types of grinding or milling (e.g., dry milling, wet milling, or vibratory ball milling).

[0737] The cellulosic-containing material can be pretreated both physically (mechanically) and chemically. Mechanical or physical pretreatment can be coupled with steaming/steam explosion, hydrothermolysis, dilute or mild acid treatment, high temperature, high pressure treatment, irradiation (e.g., microwave irradiation), or combinations thereof. In one embodiment, high pressure means pressure in the range of preferably about 100 to about 400 psi, e.g., about 150 to about 250 psi. In another embodiment, high temperature means temperature in the range of about 100 to about 300° C., e.g., about 140 to about 200° C. In a preferred embodiment, mechanical or physical pretreatment is performed in a batch-process using a steam gun hydrolyzer system that uses high pressure and high temperature as defined above, e.g., a Sunds Hydrolyzer available from Sunds Defibrator AB, Sweden. The physical and chemical pretreatments can be carried out sequentially or simultaneously, as desired.

[0738] Accordingly, in one embodiment, the cellulosic-containing material is subjected to physical (mechanical) or chemical pretreatment, or any combination thereof, to promote the separation and/or release of cellulose, hemicellulose, and/or lignin.

[0739] In one embodiment, the cellulosic-containing material is subjected to a biological pretreatment. The term “biological pretreatment” refers to any biological pretreatment that promotes the separation and/or release of cellulose, hemicellulose, and/or lignin from the cellulosic-containing material. Biological pretreatment techniques can involve applying lignin-solubilizing microorganisms and/or enzymes (see, for example, Hsu, T.-A., 1996, Pretreatment of biomass, in Handbook on Bioethanol: Production and Utilization, Wyman, C. E., ed., Taylor & Francis, Washington, DC, 179-212; Ghosh and Singh, 1993, Adv. Appl. Microbiol. 39: 295-333; McMillan, J. D., 1994, Pretreating lignocellulosic biomass: a review, in Enzymatic Conversion of Biomass for Fuels Production, Himmel, M. E., Baker, J. O., and Overend, R. P., eds., ACS Symposium Series 566, American Chemical Society, Washington, DC, chapter 15; Gong, C. S., Cao, N. J., Du, J., and Tsao, G. T., 1999, Ethanol production from renewable resources, in Advances in Biochemical Engineering/Biotechnology, Scheper, T., ed., Springer-Verlag Berlin Heidelberg, Germany, 65: 207-241; Olsson and Hahn-Hagerdal, 1996, Enz. Microb. Tech. 18: 312-331; and Vallander and Eriksson, 1990, Adv. Biochem. Eng./Biotechnol. 42: 63-95).

[0740] Saccharification and Fermentation of Cellulosic-containing material Saccharification (i.e., hydrolysis) and fermentation, separate or simultaneous, include, but are not limited to, separate hydrolysis and fermentation (SHF); simultaneous saccharification and fermentation (SSF); simultaneous saccharification and co-fermentation (SSCF); hybrid hydrolysis and fermentation (HHF); separate hydrolysis and co-fermentation (SHCF); hybrid hydrolysis and co-fermentation (HHCF).

[0741] SHF uses separate process steps to first enzymatically hydrolyze the cellulosic-containing material to fermentable sugars, e.g., glucose, cellobiose, and pentose monomers, and then ferment the fermentable sugars to ethanol. In SSF, the enzymatic hydrolysis of the cellulosic-containing material and the fermentation of sugars to ethanol are combined in one step (Philippidis, G. P., 1996, Cellulose bioconversion technology, in Handbook on Bioethanol: Production and Utilization, Wyman, C. E., ed., Taylor & Francis, Washington, DC, 179-212). SSCF involves the co-fermentation of multiple sugars (Sheehan and Himmel, 1999, Biotechnol. Prog. 15: 817-827). HHF involves a separate hydrolysis step, and in addition a simultaneous saccharification and hydrolysis step, which can be carried out in the same reactor. The steps in an HHF process can be carried out at different temperatures, i.e., high temperature enzymatic saccharification followed by SSF at a lower temperature that the fermentation organismcan tolerate. It is understood herein that any method known in the art comprising pretreatment, enzymatic hydrolysis (saccharification), fermentation, or a combination thereof, can be used in the practicing the processes described herein.

[0742] A conventional apparatus can include a fed-batch stirred reactor, a batch stirred reactor, a continuous flow stirred reactor with ultrafiltration, and/or a continuous plug-flow column reactor (de Castilhos Corazza et al., 2003, Acta Scientiarum. Technology 25: 33-38; Gusakov and Sinitsyn, 1985, Enz. Microb. Technol. 7: 346-352), an attrition reactor (Ryu and Lee, 1983, Biotechnol. Bioeng. 25: 53-65). Additional reactor types include fluidized bed, upflow blanket, immobilized, and extruder type reactors for hydrolysis and/or fermentation.

[0743] In the saccharification step (i.e., hydrolysis step), the cellulosic and/or starch-containing material, e.g., pretreated, is hydrolyzed to break down cellulose, hemicellulose, and/or starch to fermentable sugars, such as glucose, cellobiose, xylose, xylulose, arabinose, mannose, galactose, and/or soluble oligosaccharides. The hydrolysis is performed enzymatically e.g., by a cellulolytic enzyme composition. The enzymes of the compositions can be added simultaneously or sequentially.

[0744] Enzymatic hydrolysis may be carried out in a suitable aqueous environment under conditions that can be readily determined by one skilled in the art. In one embodiment, hydrolysis is performed under conditions suitable for the activity of the enzymes(s), i.e., optimal for the enzyme(s). The hydrolysis can be carried out as a fed batch or continuous process where the cellulosic and/or starch-containing material is fed gradually to, for example, an enzyme containing hydrolysis solution.

[0745] The saccharification is generally performed in stirred-tank reactors or fermentors under controlled pH, temperature, and mixing conditions. Suitable process time, temperature and pH conditions can readily be determined by one skilled in the art. For example, the saccharification can last up to 200 hours, but is typically performed for preferably about 12 to about 120 hours, e.g., about 16 to about 72 hours or about 24 to about 48 hours. The temperature is in the range of preferably about 25° C. to about 70° C., e.g., about 30° C. to about 65° C., about 40° C. to about 60° C., or about 50° C. to about 55° C. The pH is in the range of preferably about 3 to about 8, e.g., about 3.5 to about 7, about 4 to about 6, or about 4.5 to about 5.5. The dry solids content is in the range of preferably about 5 to about 50 wt. %, e.g., about 10 to about 40 wt. % or about 20 to about 30 wt. %.

[0746] Saccharification in may be carried out using a cellulolytic enzyme composition. Such enzyme compositions are described below in the “Cellulolytic Enzymes and Compositions” section below. The cellulolytic enzyme compositions can comprise any protein useful in degrading the cellulosic-containing material. In one embodiment, the cellulolytic enzyme composition comprises or further comprises one or more (e.g., several) proteins selected from the group consisting of a cellulase, an AA9 (GH61) polypeptide, a hemicellulase, an esterase, an expansin, a ligninolytic enzyme, an oxidoreductase, a pectinase, a protease, and a swollenin.

[0747] In another embodiment, the cellulase is preferably one or more (e.g., several) enzymes selected from the group consisting of an endoglucanase, a cellobiohydrolase, and a beta-glucosidase.

[0748] In another embodiment, the hemicellulase is preferably one or more (e.g., several) enzymes selected from the group consisting of an acetylmannan esterase, an acetylxylan esterase, an arabinanase, an arabinofuranosidase, a coumaric acid esterase, a feruloyl esterase, a galactosidase, a glucuronidase, a glucuronoyl esterase, a mannanase, a mannosidase, a xylanase, and a xylosidase. In another embodiment, the oxidoreductase is one or more (e.g., several) enzymes selected from the group consisting of a catalase, a laccase, and a peroxidase. The enzymes or enzyme compositions used in a processes of the present invention may be in any form suitable for use, such as, for example, a fermentation broth formulation or a cell composition, a cell lysate with or without cellular debris, a semi-purified or purified enzyme preparation, or a host cell as a source of the enzymes. The enzyme composition may be a dry powder or granulate, a non-dusting granulate, a liquid, a stabilized liquid, or a stabilized protected enzyme. Liquid enzyme preparations may, for instance, be stabilized by adding stabilizers such as a sugar, a sugar alcohol or another polyol, and/or lactic acid or another organic acid according to established processes.

[0749] In one embodiment, an effective amount of cellulolytic or hemicellulolytic enzyme composition to the cellulosic-containing material is about 0.5 to about 50 mg, e.g., about 0.5 to about 40 mg, about 0.5 to about 25 mg, about 0.75 to about 20 mg, about 0.75 to about 15 mg, about 0.5 to about 10 mg, or about 2.5 to about 10 mg per g of the cellulosic-containing material.

[0750] In one embodiment, such a compound is added at a molar ratio of the compound to glucosyl units of cellulose of about 10⁻⁶ to about 10, e.g., about 10⁻⁶ to about 7.5, about 10⁻⁶ to about 5, about 10⁻⁶ to about 2.5, about 10⁻⁶ to about 1, about 10⁻⁵ to about 1, about 10⁻⁵ to about 10⁻¹, about 10⁻⁴ to about 10⁻¹, about 10⁻³ to about 10⁻¹, or about 10⁻³ to about 10⁻². In another embodiment, an effective amount of such a compound is about 0.1 μM to about 1 M, e.g., about 0.5 μM to about 0.75 M, about 0.75 μM to about 0.5 M, about 1 μM to about 0.25 M, about 1 μM to about 0.1 M, about 5 μM to about 50 mM, about 10 μM to about 25 mM, about 50 μM to about 25 mM, about 10 μM to about 10 mM, about 5 μM to about 5 mM, or about 0.1 mM to about 1 mM.

[0751] The term “liquor” means the solution phase, either aqueous, organic, or a combination thereof, arising from treatment of a lignocellulose and/or hemicellulose material in a slurry, or monosaccharides thereof, e.g., xylose, arabinose, mannose, etc. under conditions as described in WO2012/021401, and the soluble contents thereof. A liquor for cellulolytic enhancement of an AA9 polypeptide (GH61 polypeptide) can be produced by treating a lignocellulose or hemicellulose material (or feedstock) by applying heat and/or pressure, optionally in the presence of a catalyst, e.g., acid, optionally in the presence of an organic solvent, and optionally in combination with physical disruption of the material, and then separating the solution from the residual solids. Such conditions determine the degree of cellulolytic enhancement obtainable through the combination of liquor and an AA9 polypeptide during hydrolysis of a cellulosic substrate by a cellulolytic enzyme preparation. The liquor can be separated from the treated material using a method standard in the art, such as filtration, sedimentation, or centrifugation.

[0752] In one embodiment, an effective amount of the liquor to cellulose is about 10⁻⁶ to about 10 g per g of cellulose, e.g., about 10⁻⁶ to about 7.5 g, about 10⁻⁶ to about 5 g, about 10⁻⁶ to about 2.5 g, about 10⁻⁶ to about 1 g, about 10⁻⁵ to about 1 g, about 10⁻⁵ to about 10⁻¹ g, about 10⁻⁴ to about 10⁻¹ g, about 10⁻³ to about 10⁻¹ g, or about 10⁻³ to about 10⁻² g per g of cellulose.

[0753] In the fermentation step, sugars, released from the cellulosic-containing material, e.g., as a result of the pretreatment and enzymatic hydrolysis steps, are fermented to ethanol, by a host cell or fermenting organism, such as yeast described herein. Hydrolysis (saccharification) and fermentation can be separate or simultaneous.

[0754] Any suitable hydrolyzed cellulosic-containing material can be used in the fermentation step in practicing the processes described herein. Such feedstocks include, but are not limited to carbohydrates (e.g., lignocellulose, xylans, cellulose, starch, etc.). The material is generally selected based on economics, i.e., costs per equivalent sugar potential, and recalcitrance to enzymatic conversion.

[0755] Production of ethanol by a host cell or fermenting organism using cellulosic-containing material results from the metabolism of sugars (monosaccharides). The sugar composition of the hydrolyzed cellulosic-containing material and the ability of the host cell or fermenting organism to utilize the different sugars has a direct impact in process yields. Prior to Applicant's disclosure herein, strains known in the art utilize glucose efficiently but do not (or very limitedly) metabolize pentoses like xylose, a monosaccharide commonly found in hydrolyzed material.

[0756] Compositions of the fermentation media and fermentation conditions depend on the host cell or fermenting organism and can easily be determined by one skilled in the art. Typically, the fermentation takes place under conditions known to be suitable for generating the fermentation product. In some embodiments, the fermentation process is carried out under aerobic or microaerophilic (i.e., where the concentration of oxygen is less than that in air), or anaerobic conditions. In some embodiments, fermentation is conducted under anaerobic conditions (i.e., no detectable oxygen), or less than about 5, about 2.5, or about 1 mmol/L/h oxygen. In the absence of oxygen, the NADH produced in glycolysis cannot be oxidized by oxidative phosphorylation.

[0757] Under anaerobic conditions, pyruvate or a derivative thereof may be utilized by the host cell as an electron and hydrogen acceptor in order to generate NAD+.

[0758] The fermentation process is typically run at a temperature that is optimal for the recombinant fungal cell. For example, in some embodiments, the fermentation process is performed at a temperature in the range of from about 25° C. to about 42° C. Typically the process is carried out a temperature that is less than about 38° C., less than about 35° C., less than about 33° C., or less than about 38° C., but at least about 20° C., 22° C., or 25° C.

[0759] A fermentation stimulator can be used in a process described herein to further improve the fermentation, and in particular, the performance of the host cell or fermenting organism, such as, rate enhancement and product yield (e.g., ethanol yield). A “fermentation stimulator” refers to stimulators for growth of the host cells and fermenting organisms, in particular, yeast. Preferred fermentation stimulators for growth include vitamins and minerals. Examples of vitamins include multivitamins, biotin, pantothenate, nicotinic acid, meso-inositol, thiamine, pyridoxine, para-aminobenzoic acid, folic acid, riboflavin, and Vitamins A, B, C, D, and E. See, for example, Alfenore et al., Improving ethanol production and viability of Saccharomyces cerevisiae by a vitamin feeding strategy during fed-batch process, Springer-Verlag (2002), which is hereby incorporated by reference. Examples of minerals include minerals and mineral salts that can supply nutrients comprising P, K, Mg, S, Ca, Fe, Zn, Mn, and Cu.

### Cellulolytic Enzymes and Compositions

[0760] A cellulolytic enzyme or cellulolytic enzyme composition may be present and/or added during saccharification. A cellulolytic enzyme composition is an enzyme preparation containing one or more (e.g., several) enzymes that hydrolyze cellulosic-containing material. Such enzymes include endoglucanase, cellobiohydrolase, beta-glucosidase, and/or combinations thereof.

[0761] In some embodiments, the host cell or fermenting organism comprises one or more (e.g., several) heterologous polynucleotides encoding enzymes that hydrolyze cellulosic-containing material (e.g., an endoglucanase, cellobiohydrolase, beta-glucosidase or combinations thereof). Any enzyme described or referenced herein that hydrolyzes cellulosic-containing material is contemplated for expression in the host cell or fermenting organism.

[0762] The cellulolytic enzyme may be any cellulolytic enzyme that is suitable for the host cells and/or the methods described herein (e.g., an endoglucanase, cellobiohydrolase, beta-glucosidase), such as a naturally occurring cellulolytic enzyme or a variant thereof that retains cellulolytic enzyme activity.

[0763] In some embodiments, the host cell or fermenting organism comprising a heterologous polynucleotide encoding a cellulolytic enzyme has an increased level of cellulolytic enzyme activity (e.g., increased endoglucanase, cellobiohydrolase, and/or beta-glucosidase) compared to the host cells without the heterologous polynucleotide encoding the cellulolytic enzyme, when cultivated under the same conditions. In some embodiments, the host cell or fermenting organism has an increased level of cellulolytic enzyme activity of at least 5%, e.g., at least 10%, at least 15%, at least 20%, at least 25%, at least 50%, at least 100%, at least 150%, at least 200%, at least 300%, or at 500% compared to the host cell or fermenting organism without the heterologous polynucleotide encoding the cellulolytic enzyme, when cultivated under the same conditions.

[0764] Exemplary cellulolytic enzymes that can be used with the host cells and/or the methods described herein include bacterial, yeast, or filamentous fungal cellulolytic enzymes, e.g., obtained from any of the microorganisms described or referenced herein, as described supra under the sections related to proteases.

[0765] The cellulolytic enzyme may be of any origin. In an embodiment the cellulolytic enzyme is derived from a strain of Trichoderma, such as a strain of Trichoderma reesei; a strain of Humicola, such as a strain of Humicola insolens, and/or a strain of Chrysosporium, such as a strain of Chrysosporium lucknowense. In a preferred embodiment the cellulolytic enzyme is derived from a strain of Trichoderma reesei.

[0766] The cellulolytic enzyme composition may further comprise one or more of the following polypeptides, such as enzymes: AA9 polypeptide (GH61 polypeptide) having cellulolytic enhancing activity, beta-glucosidase, xylanase, beta-xylosidase, CBH I, CBH II, or a mixture of two, three, four, five or six thereof.

[0767] The further polypeptide(s) (e.g., AA9 polypeptide) and/or enzyme(s) (e.g., beta-glucosidase, xylanase, beta-xylosidase, CBH I and/or CBH II may be foreign to the cellulolytic enzyme composition producing organism (e.g., Trichoderma reesei).

[0768] In an embodiment the cellulolytic enzyme composition comprises an AA9 polypeptide having cellulolytic enhancing activity and a beta-glucosidase.

[0769] In another embodiment the cellulolytic enzyme composition comprises an AA9 polypeptide having cellulolytic enhancing activity, a beta-glucosidase, and a CBH I.

[0770] In another embodiment the cellulolytic enzyme composition comprises an AA9 polypeptide having cellulolytic enhancing activity, a beta-glucosidase, a CBH I and a CBH II.

[0771] Other enzymes, such as endoglucanases, may also be comprised in the cellulolytic enzyme composition.

[0772] As mentioned above the cellulolytic enzyme composition may comprise a number of difference polypeptides, including enzymes.

[0773] In one embodiment, the cellulolytic enzyme composition is a Trichoderma reesei cellulolytic enzyme composition, further comprising Thermoascus aurantiacus AA9 (GH61A) polypeptide having cellulolytic enhancing activity (e.g., WO2005/074656), and Aspergillus oryzae beta-glucosidase fusion protein (e.g., one disclosed in WO2008/057637, in particular shown as SEQ ID NOs: 59 and 60).

[0774] In another embodiment the cellulolytic enzyme composition is a Trichoderma reesei cellulolytic enzyme composition, further comprising Thermoascus aurantiacus AA9 (GH61A) polypeptide having cellulolytic enhancing activity (e.g., SEQ ID NO: 2 in WO2005/074656), and Aspergillus fumigatus beta-glucosidase (e.g., SEQ ID NO: 2 of WO2005/047499).

[0775] In another embodiment the cellulolytic enzyme composition is a Trichoderma reesei cellulolytic enzyme composition, further comprising Penicillium emersonii AA9 (GH61A) polypeptide having cellulolytic enhancing activity, in particular the one disclosed in WO2011/041397, and Aspergillus fumigatus beta-glucosidase (e.g., SEQ ID NO: 2 of WO2005/047499).

[0776] In another embodiment the cellulolytic enzyme composition is a Trichoderma reesei cellulolytic enzyme composition, further comprising Penicillium emersonii AA9 (GH61A) polypeptide having cellulolytic enhancing activity, in particular the one disclosed in WO2011/041397, and Aspergillus fumigatus beta-glucosidase (e.g., SEQ ID NO: 2 of WO2005/047499) or a variant disclosed in WO2012/044915 (hereby incorporated by reference), in particular one comprising one or more such as all of the following substitutions: F100D, S283G, N456E, F512Y.

[0777] In an embodiment the cellulolytic enzyme composition is a Trichoderma reesei cellulolytic composition, further comprising an AA9 (GH61A) polypeptide having cellulolytic enhancing activity, in particular the one derived from a strain of Penicillium emersonii (e.g., SEQ ID NO: 2 in WO2011/041397), Aspergillus fumigatus beta-glucosidase (e.g., SEQ ID NO: 2 in WO 2005/047499) variant with one or more, in particular all of the following substitutions: F100D, S283G, N456E, F512Y and disclosed in WO2012/044915; Aspergillus fumigatus Cel7A CBH1, e.g., the one disclosed as SEQ ID NO: 6 in WO2011/057140 and Aspergillus fumigatus CBH II, e.g., the one disclosed as SEQ ID NO: 18 in WO2011/057140.

[0778] In a preferred embodiment the cellulolytic enzyme composition is a Trichoderma reesei, cellulolytic enzyme composition, further comprising a hemicellulase or hemicellulolytic enzyme composition, such as an Aspergillus fumigatus xylanase and Aspergillus fumigatus beta-xylosidase.

[0779] In an embodiment the cellulolytic enzyme composition also comprises a xylanase (e.g., derived from a strain of the genus Aspergillus, in particular Aspergillus aculeatus or Aspergillus fumigatus; or a strain of the genus Talaromyces, in particular Talaromyces leycettanus) and/or a beta-xylosidase (e.g., derived from Aspergillus, in particular Aspergillus fumigatus, or a strain of Talaromyces, in particular Talaromyces emersonii).

[0780] In an embodiment the cellulolytic enzyme composition is a Trichoderma reesei cellulolytic enzyme composition, further comprising Thermoascus aurantiacus AA9 (GH61A) polypeptide having cellulolytic enhancing activity (e.g., WO2005/074656), Aspergillus oryzae beta-glucosidase fusion protein (e.g., one disclosed in WO2008/057637, in particular as SEQ ID NOs: 59 and 60), and Aspergillus aculeatus xylanase (e.g., Xyl II in WO94/21785).

[0781] In another embodiment the cellulolytic enzyme composition comprises a Trichoderma reesei cellulolytic preparation, further comprising Thermoascus aurantiacus GH61A polypeptide having cellulolytic enhancing activity (e.g., SEQ ID NO: 2 in WO2005/074656), Aspergillus fumigatus beta-glucosidase (e.g., SEQ ID NO: 2 of WO2005/047499) and Aspergillus aculeatus xylanase (Xyl II disclosed in WO94/21785).

[0782] In another embodiment the cellulolytic enzyme composition comprises a Trichoderma reesei cellulolytic enzyme composition, further comprising Thermoascus aurantiacus AA9 (GH61A) polypeptide having cellulolytic enhancing activity (e.g., SEQ ID NO: 2 in WO2005/074656), Aspergillus fumigatus beta-glucosidase (e.g., SEQ ID NO: 2 of WO2005/047499) and Aspergillus aculeatus xylanase (e.g., Xyl II disclosed in WO94/21785).

[0783] In another embodiment the cellulolytic enzyme composition is a Trichoderma reesei cellulolytic enzyme composition, further comprising Penicillium emersonii AA9 (GH61A) polypeptide having cellulolytic enhancing activity, in particular the one disclosed in WO2011/041397, Aspergillus fumigatus beta-glucosidase (e.g., SEQ ID NO: 2 of WO2005/047499) and Aspergillus fumigatus xylanase (e.g., Xyl Ill in WO2006/078256).

[0784] In another embodiment the cellulolytic enzyme composition comprises a Trichoderma reesei cellulolytic enzyme composition, further comprising Penicillium emersonii AA9 (GH61A) polypeptide having cellulolytic enhancing activity, in particular the one disclosed in WO2011/041397, Aspergillus fumigatus beta-glucosidase (e.g., SEQ ID NO: 2 of WO2005/047499), Aspergillus fumigatus xylanase (e.g., Xyl Ill in WO2006/078256), and CBH I from Aspergillus fumigatus, in particular Cel7A CBH1 disclosed as SEQ ID NO: 2 in WO2011/057140.

[0785] In another embodiment the cellulolytic enzyme composition is a Trichoderma reesei cellulolytic enzyme composition, further comprising Penicillium emersonii AA9 (GH61A) polypeptide having cellulolytic enhancing activity, in particular the one disclosed in WO2011/041397, Aspergillus fumigatus beta-glucosidase (e.g., SEQ ID NO: 2 of WO2005/047499), Aspergillus fumigatus xylanase (e.g., Xyl Ill in WO2006/078256), CBH I from Aspergillus fumigatus, in particular Cel7A CBH1 disclosed as SEQ ID NO: 2 in WO2011/057140, and CBH II derived from Aspergillus fumigatus in particular the one disclosed as SEQ ID NO: 4 in WO2013/028928.

[0786] In another embodiment the cellulolytic enzyme composition is a Trichoderma reesei cellulolytic enzyme composition, further comprising Penicillium emersonii AA9 (GH61A) polypeptide having cellulolytic enhancing activity, in particular the one disclosed in WO2011/041397, Aspergillus fumigatus beta-glucosidase (e.g., SEQ ID NO: 2 of WO2005/047499) or variant thereof with one or more, in particular all, of the following substitutions: F100D, S283G, N456E, F512Y; Aspergillus fumigatus xylanase (e.g., Xyl Ill in WO2006/078256), CBH I from Aspergillus fumigatus, in particular Cel7A CBH I disclosed as SEQ ID NO: 2 in WO2011/057140, and CBH II derived from Aspergillus fumigatus, in particular the one disclosed in WO2013/028928.

[0787] In another embodiment the cellulolytic enzyme composition is a Trichoderma reesei cellulolytic enzyme composition comprising the CBH I (GENSEQP Accession No. AZY49536 (WO2012/103293); a CBH II (GENSEQP Accession No. AZY49446 (WO2012/103288); a beta-glucosidase variant (GENSEQP Accession No. AZU67153 (WO2012/44915)), in particular with one or more, in particular all, of the following substitutions: F100D, S283G, N456E, F512Y; and AA9 (GH61 polypeptide) (GENSEQP Accession No. BAL61510 (WO2013/028912)).

[0788] In another embodiment the cellulolytic enzyme composition is a Trichoderma reesei cellulolytic enzyme composition comprising a CBH I (GENSEQP Accession No. AZY49536 (WO2012/103293)); a CBH II (GENSEQP Accession No. AZY49446 (WO2012/103288); a GH10 xylanase (GENSEQP Accession No. BAK46118 (WO2013/019827)); and a beta-xylosidase (GENSEQP Accession No. AZI04896 (WO2011/057140)).

[0789] In another embodiment the cellulolytic enzyme composition is a Trichoderma reesei cellulolytic enzyme composition comprising a CBH I (GENSEQP Accession No. AZY49536 (WO2012/103293)); a CBH II (GENSEQP Accession No. AZY49446 (WO2012/103288)); and an AA9 (GH61 polypeptide; GENSEQP Accession No. BAL61510 (WO2013/028912)).

[0790] In another embodiment the cellulolytic enzyme composition is a Trichoderma reesei cellulolytic enzyme composition comprising a CBH I (GENSEQP Accession No. AZY49536 (WO2012/103293)); a CBH II (GENSEQP Accession No. AZY49446 (WO2012/103288)), an AA9 (GH61 polypeptide; GENSEQP Accession No. BAL61510 (WO2013/028912)), and a catalase (GENSEQP Accession No. BAC11005 (WO2012/130120)).

[0791] In an embodiment the cellulolytic enzyme composition is a Trichoderma reesei cellulolytic enzyme composition comprising a CBH I (GENSEQP Accession No.

[0792] AZY49446 (WO2012/103288); a CBH II (GENSEQP Accession No. AZY49446 (WO2012/103288)), a beta-glucosidase variant (GENSEQP Accession No. AZU67153 (WO2012/44915)), with one or more, in particular all, of the following substitutions: F100D, S283G, N456E, F512Y; an AA9 (GH61 polypeptide; GENSEQP Accession No. BAL61510 (WO2013/028912)), a GH10 xylanase (GENSEQP Accession No. BAK46118 (WO2013/019827)), and a beta-xylosidase (GENSEQP Accession No. AZI04896 (WO2011/057140)).

[0793] In an embodiment the cellulolytic composition is a Trichoderma reesei cellulolytic enzyme preparation comprising an EG I (Swissprot Accession No. P07981), EG II (EMBL Accession No. M19373), CBH I (supra); CBH II (supra); beta-glucosidase variant (supra) with the following substitutions: F100D, S283G, N456E, F512Y; an AA9 (GH61 polypeptide; supra), GH10 xylanase (supra); and beta-xylosidase (supra).

[0794] All cellulolytic enzyme compositions disclosed in WO2013/028928 are also contemplated and hereby incorporated by reference.

[0795] The cellulolytic enzyme composition comprises or may further comprise one or more (several) proteins selected from the group consisting of a cellulase, a AA9 (i.e., GH61) polypeptide having cellulolytic enhancing activity, a hemicellulase, an expansin, an esterase, a laccase, a ligninolytic enzyme, a pectinase, a peroxidase, a protease, and a swollenin.

[0796] In one embodiment the cellulolytic enzyme composition is a commercial cellulolytic enzyme composition. Examples of commercial cellulolytic enzyme compositions suitable for use in a process of the invention include: CELLIC® CTec (Novozymes A/S), CELLIC® CTec2 (Novozymes A/S), CELLIC® CTec3 (Novozymes A/S), CELLUCLAST™ (Novozymes A/S), SPEZYME™ CP (Genencor Int.), ACCELLERASE™ 1000, ACCELLERASE 1500, ACCELLERASE™ TRIO (DuPont), FILTRASE® NL (DSM); METHAPLUS® S/L 100 (DSM), ROHAMENT™ 7069 W (R6hm GmbH), or ALTERNAFUEL® CMAX3™ (Dyadic International, Inc.). The cellulolytic enzyme composition may be added in an amount effective from about 0.001 to about 5.0 wt. % of solids, e.g., about 0.025 to about 4.0 wt. % of solids or about 0.005 to about 2.0 wt. % of solids.

[0797] Additional enzymes, and compositions thereof can be found in WO2011/153516 and WO2016/045569 (the contents of which are incorporated herein).

[0798] Additional polynucleotides encoding suitable cellulolytic enzymes may be obtained from microorganisms of any genus, including those readily available within the UniProtKB database.

[0799] The cellulolytic enzyme coding sequences can also be used to design nucleic acid probes to identify and clone DNA encoding cellulolytic enzymes from strains of different genera or species, as described supra.

[0800] The polynucleotides encoding cellulolytic enzymes may also be identified and obtained from other sources including microorganisms isolated from nature (e.g., soil, composts, water, etc.) or DNA samples obtained directly from natural materials (e.g., soil, composts, water, etc.) as described supra.

[0801] Techniques used to isolate or clone polynucleotides encoding cellulolytic enzymes are described supra.

[0802] In one embodiment, the cellulolytic enzyme has a mature polypeptide sequence of at least 60%, e.g., at least 65%, at least 70%, at least 75%, at least 80%, at least 85%, at least 90%, at least 91%, at least 92%, at least 93%, at least 94%, at least 95%, at least 96%, at least 97%, at least 98%, at least 99%, or 100% sequence identity to any cellulolytic enzyme described or referenced herein (e.g., any endoglucanase, cellobiohydrolase, or beta-glucosidase). In one embodiment, the cellulolytic enzyme ha a mature polypeptide sequence that differs by no more than ten amino acids, e.g., by no more than five amino acids, by no more than four amino acids, by no more than three amino acids, by no more than two amino acids, or by one amino acid from any cellulolytic enzyme described or referenced herein. In one embodiment, the cellulolytic enzyme has a mature polypeptide sequence that comprises or consists of the amino acid sequence of any cellulolytic enzyme described or referenced herein, allelic variant, or a fragment thereof having cellulolytic enzyme activity. In one embodiment, the cellulolytic enzyme has an amino acid substitution, deletion, and/or insertion of one or more (e.g., two, several) amino acids. In some embodiments, the total number of amino acid substitutions, deletions and/or insertions is not more than 10, e.g., not more than 9, 8, 7, 6, 5, 4, 3, 2, or 1.

[0803] In some embodiments, the cellulolytic enzyme has at least 20%, e.g., at least 40%, at least 50%, at least 60%, at least 70%, at least 80%, at least 90%, at least 95%, at least 96%, at least 97%, at least 98%, at least 99%, or 100% of the cellulolytic enzyme activity of any cellulolytic enzyme described or referenced herein (e.g., any endoglucanase, cellobiohydrolase, or beta-glucosidase) under the same conditions.

[0804] In one embodiment, the cellulolytic enzyme coding sequence hybridizes under at least low stringency conditions, e.g., medium stringency conditions, medium-high stringency conditions, high stringency conditions, or very high stringency conditions with the full-length complementary strand of the coding sequence from any cellulolytic enzyme described or referenced herein (e.g., any endoglucanase, cellobiohydrolase, or beta-glucosidase). In one embodiment, the cellulolytic enzyme coding sequence has at least 65%, e.g., at least 70%, at least 75%, at least 80%, at least 85%, at least 85%, at least 90%, at least 91%, at least 92%, at least 93%, at least 94%, at least 95%, at least 96%, at least 97%, at least 98%, at least 99%, or 100% sequence identity with the coding sequence from any cellulolytic enzyme described or referenced herein.

[0805] In one embodiment, the polynucleotide encoding the cellulolytic enzyme comprises the coding sequence of any cellulolytic enzyme described or referenced herein (e.g., any endoglucanase, cellobiohydrolase, or beta-glucosidase). In one embodiment, the polynucleotide encoding the cellulolytic enzyme comprises a subsequence of the coding sequence from any cellulolytic enzyme described or referenced herein, wherein the subsequence encodes a polypeptide having cellulolytic enzyme activity. In one embodiment, the number of nucleotides residues in the subsequence is at least 75%, e.g., at least 80%, 85%, 90%, or 95% of the number of the referenced coding sequence.

[0806] The cellulolytic enzyme can also include fused polypeptides or cleavable fusion polypeptides, as described supra.

### Fermentation Products

[0807] A fermentation product can be any substance derived from the fermentation. The fermentation product can be, without limitation, an alcohol (e.g., arabinitol, n-butanol, isobutanol, ethanol, glycerol, methanol, ethylene glycol, 1,3-propanediol [propylene glycol], butanediol, glycerin, sorbitol, and xylitol); an alkane (e.g., pentane, hexane, heptane, octane, nonane, decane, undecane, and dodecane), a cycloalkane (e.g., cyclopentane, cyclohexane, cycloheptane, and cyclooctane), an alkene (e.g., pentene, hexene, heptene, and octene); an amino acid (e.g., aspartic acid, glutamic acid, glycine, lysine, serine, and threonine); a gas (e.g., methane, hydrogen (H₂), carbon dioxide (CO₂), and carbon monoxide (CO)); isoprene; a ketone (e.g., acetone); an organic acid (e.g., acetic acid, acetonic acid, adipic acid, ascorbic acid, citric acid, 2,5-diketo-D-gluconic acid, formic acid, fumaric acid, glucaric acid, gluconic acid, glucuronic acid, glutaric acid, 3-hydroxypropionic acid, itaconic acid, lactic acid, malic acid, malonic acid, oxalic acid, oxaloacetic acid, propionic acid, succinic acid, and xylonic acid); and polyketide.

[0808] In one embodiment, the fermentation product is an alcohol. The term “alcohol” encompasses a substance that contains one or more hydroxyl moieties. The alcohol can be, but is not limited to, n-butanol, isobutanol, ethanol, methanol, arabinitol, butanediol, ethylene glycol, glycerin, glycerol, 1,3-propanediol, sorbitol, xylitol. See, for example, Gong et al., 1999, Ethanol production from renewable resources, in Advances in Biochemical Engineering/Biotechnology, Scheper, T., ed., Springer-Verlag Berlin Heidelberg, Germany, 65: 207-241; Silveira and Jonas, 2002, Appl. Microbiol. Biotechnol. 59: 400-408; Nigam and Singh, 1995, Process Biochemistry 30(2): 117-124; Ezeji et al., 2003, World Journal of Microbiology and Biotechnology 19(6): 595-603. In one embodiment, the fermentation product is ethanol.

[0809] In another embodiment, the fermentation product is an alkane. The alkane may be an unbranched or a branched alkane. The alkane can be, but is not limited to, pentane, hexane, heptane, octane, nonane, decane, undecane, or dodecane.

[0810] In another embodiment, the fermentation product is a cycloalkane. The cycloalkane can be, but is not limited to, cyclopentane, cyclohexane, cycloheptane, or cyclooctane.

[0811] In another embodiment, the fermentation product is an alkene. The alkene may be an unbranched or a branched alkene. The alkene can be, but is not limited to, pentene, hexene, heptene, or octene.

[0812] In another embodiment, the fermentation product is an amino acid. The organic acid can be, but is not limited to, aspartic acid, glutamic acid, glycine, lysine, serine, or threonine. See, for example, Richard and Margaritis, 2004, Biotechnology and Bioengineering 87(4): 501-515.

[0813] In another embodiment, the fermentation product is a gas. The gas can be, but is not limited to, methane, H₂, CO₂, or CO. See, for example, Kataoka et al., 1997, Water Science and Technology 36(6-7): 41-47; and Gunaseelan, 1997, Biomass and Bioenergy 13(1-2): 83-114.

[0814] In another embodiment, the fermentation product is isoprene.

[0815] In another embodiment, the fermentation product is a ketone. The term “ketone” encompasses a substance that contains one or more ketone moieties. The ketone can be, but is not limited to, acetone.

[0816] In another embodiment, the fermentation product is an organic acid. The organic acid can be, but is not limited to, acetic acid, acetonic acid, adipic acid, ascorbic acid, citric acid, 2,5-diketo-D-gluconic acid, formic acid, fumaric acid, glucaric acid, gluconic acid, glucuronic acid, glutaric acid, 3-hydroxypropionic acid, itaconic acid, lactic acid, malic acid, malonic acid, oxalic acid, propionic acid, succinic acid, or xylonic acid. See, for example, Chen and Lee, 1997, Appl. Biochem. Biotechnol. 63-65: 435-448.

[0817] In another embodiment, the fermentation product is polyketide.

### Recovery

[0818] The fermentation product, e.g., ethanol, can optionally be recovered from the fermentation medium using any method known in the art including, but not limited to, chromatography, electrophoretic procedures, differential solubility, distillation, or extraction. For example, alcohol is separated from the fermented cellulosic material and purified by conventional methods of distillation. Ethanol with a purity of up to about 96 vol. % can be obtained, which can be used as, for example, fuel ethanol, drinking ethanol, i.e., potable neutral spirits, or industrial ethanol.

[0819] In some embodiments of the methods, the fermentation product after being recovered is substantially pure. With respect to the methods herein, “substantially pure” intends a recovered preparation that contains no more than 15% impurity, wherein impurity intends compounds other than the fermentation product (e.g., ethanol). In one variation, a substantially pure preparation is provided wherein the preparation contains no more than 25% impurity, or no more than 20% impurity, or no more than 10% impurity, or no more than 5% impurity, or no more than 3% impurity, or no more than 1% impurity, or no more than 0.5% impurity.

[0820] Suitable assays to test for the production of ethanol and contaminants, and sugar consumption can be performed using methods known in the art. For example, ethanol product, as well as other organic compounds, can be analyzed by methods such as HPLC (High Performance Liquid Chromatography), GC-MS (Gas Chromatography Mass Spectroscopy) and LC-MS (Liquid Chromatography-Mass Spectroscopy) or other suitable analytical methods using routine procedures well known in the art. The release of ethanol in the fermentation broth can also be tested with the culture supernatant. Byproducts and residual sugar in the fermentation medium (e.g., glucose orxylose) can be quantified by HPLC using, for example, a refractive index detector for glucose and alcohols, and a UV detector for organic acids (Lin et al., Biotechnol. Bioeng. 90:775-779 (2005)), or using other suitable assay and detection methods well known in the art.

[0821] The invention may further be described in the following numbered paragraphs:

[0822] Paragraph [1]. A recombinant host cell comprising:
[0823] a heterologous polynucleotide encoding a glycerol transporter, and
[0824] a heterologous polynucleotide encoding a non-phosphorylating NADP-dependent glyceraldehyde-3-phosphate dehydrogenase (GAPN).

[0825] Paragraph [2]. The recombinant host cell of paragraph [1], wherein the cell is capable of reduced glycerol production compared to the same cell without the heterologous polynucleotide encoding the non-phosphorylating NADP-dependent glyceraldehyde-3-phosphate dehydrogenase (GAPN) when fermented under the same conditions (e.g., after 40 hours of fermentation).

[0826] Paragraph [3]. The recombinant host cell of paragraph [1] or [2], wherein the cell is capable of reduced glycerol production compared to the same cell without the heterologous polynucleotide encoding the glycerol transporter when fermented under the same conditions (e.g., after 40 hours of fermentation).

[0827] Paragraph [4]. The recombinant host cell of any one of paragraphs [1]-[3], wherein the heterologous polynucleotide encoding the non-phosphorylating NADP-dependent glyceraldehyde-3-phosphate dehydrogenase (GAPN) is operably linked to a promoter that is foreign to the polynucleotide.

[0828] Paragraph [5]. The recombinant host cell of any one of paragraphs [1]-[4], wherein the non-phosphorylating NADP-dependent glyceraldehyde-3-phosphate dehydrogenase (GAPN) has a mature polypeptide sequence with at least 60%, e.g., at least 65%, 70%, 75%, 80%, 85%, 90%, 95%, 97%, 98%, 99%, or 100% sequence identity to any one of SEQ ID NOs: 262-280 and 365-391.

[0829] Paragraph [6]. The recombinant host cell of any one of paragraphs [1]-[5], wherein the non-phosphorylating NADP-dependent glyceraldehyde-3-phosphate dehydrogenase (GAPN) has a mature polypeptide sequence that differs by no more than ten amino acids, e.g., by no more than five amino acids, by no more than four amino acids, by no more than three amino acids, by no more than two amino acids, or by one amino acid from any one of SEQ ID NOs: 262-280 and 365-391.

[0830] Paragraph [7]. The recombinant host cell of any one of paragraphs [1]-[6], wherein the non-phosphorylating NADP-dependent glyceraldehyde-3-phosphate dehydrogenase (GAPN) has a mature polypeptide sequence comprising or consisting of the amino acid sequence of any one SEQ ID NOs: 262-280 and 365-391.

[0831] Paragraph [8]. The recombinant host cell of any one of paragraphs [1]-[7], wherein the heterologous polynucleotide encoding the glycerol transporter is operably linked to a promoter that is foreign to the polynucleotide.

[0832] Paragraph [9]. The recombinant host cell of any one of paragraphs [1]-[8], wherein the glycerol transporter has a mature polypeptide sequence with at least 60%, e.g., at least 65%, 70%, 75%, 80%, 85%, 90%, 95%, 97%, 98%, 99%, or 100% sequence identity to any one of SEQ ID NOs: 312-323 (e.g., SEQ ID NO: 312, 313, 315, 317, 318, 319, 320 or 323).

[0833] Paragraph [10]. The recombinant host cell of any one of paragraphs [1]-[9], wherein the glycerol transporter has a mature polypeptide sequence that differs by no more than ten amino acids, e.g., by no more than five amino acids, by no more than four amino acids, by no more than three amino acids, by no more than two amino acids, or by one amino acid from any one of SEQ ID NOs: 312-323 (e.g., SEQ ID NO: 312, 313, 315, 317, 318, 319, 320 or 323).

[0834] Paragraph [11]. The recombinant host cell of any one of paragraphs [1]-[10], wherein the glycerol transporter has a mature polypeptide sequence comprising or consisting of the amino acid sequence of any one of SEQ ID NOs: 312-323 (e.g., SEQ ID NO: 312, 313, 315, 317, 318, 319, 320 or 323).

[0835] Paragraph [12]. A recombinant host cell comprising:
[0836] a heterologous polynucleotide encoding a glycerol transporter, wherein the glycerol transporter has a mature polypeptide sequence with at least 60%, e.g., at least 65%, 70%, 75%, 80%, 85%, 90%, 95%, 97%, 98%, 99%, or 100% sequence identity to any one of SEQ ID NOs: 312-323 (e.g., SEQ ID NO: 312, 313, 315, 317, 318, 319, 320 or 323); and/or
[0837] a heterologous polynucleotide encoding a glucose transporter, wherein the glucose transporter has a mature polypeptide sequence with at least 60%, e.g., at least 65%, 70%, 75%, 80%, 85%, 90%, 95%, 97%, 98%, 99%, or 100% sequence identity to SEQ ID NO: 361, 362, 363, or 364.

[0838] Paragraph [13]. The recombinant host cell of paragraph [12], wherein the cell comprises a heterologous polynucleotide encoding a glycerol transporter, and wherein the cell is capable of reduced glycerol production compared to the same cell without the heterologous polynucleotide encoding the glycerol transporter under the same conditions (e.g., after 40 hours of fermentation).

[0839] Paragraph [14]. The recombinant host cell of paragraph [12] or [13], wherein the cell comprises a heterologous polynucleotide encoding a glycerol transporter, and wherein the heterologous polynucleotide encoding the glycerol transporter is operably linked to a promoter that is foreign to the polynucleotide.

[0840] Paragraph [15]. The recombinant host cell of any one of paragraphs [12]-[14], wherein the cell comprises a heterologous polynucleotide encoding a glycerol transporter having a mature polypeptide sequence that differs by no more than ten amino acids, e.g., by no more than five amino acids, by no more than four amino acids, by no more than three amino acids, by no more than two amino acids, or by one amino acid from any one of SEQ ID NOs: 312-323 (e.g., SEQ ID NO: 312, 313, 315, 317, 318, 319, 320 or 323).

[0841] Paragraph [16]. The recombinant host cell of any one of paragraphs [12]-[15], wherein the cell comprises a heterologous polynucleotide encoding a glycerol transporter having a mature polypeptide sequence comprising or consisting of the amino acid sequence of any one of SEQ ID NOs: 312-323 (e.g., SEQ ID NO: 312, 313, 315, 317, 318, 319, 320 or 323).

[0842] Paragraph [17]. The recombinant host cell of any one of paragraph [12]-[16], wherein the cell comprises a heterologous polynucleotide encoding a glucose transporter, and wherein the heterologous polynucleotide encoding the glucose transporter is operably linked to a promoter that is foreign to the polynucleotide.

[0843] Paragraph [18]. The recombinant host cell of any one of paragraph [12]-[17], wherein the cell comprises a heterologous polynucleotide encoding a glucose transporter having a mature polypeptide sequence that differs by no more than ten amino acids, e.g., by no more than five amino acids, by no more than four amino acids, by no more than three amino acids, by no more than two amino acids, or by one amino acid from SEQ ID NO: 361, 362, 363, or 364.

[0844] Paragraph [19]. The recombinant host cell of any one of paragraphs [12]-[18], wherein the cell comprises a heterologous polynucleotide encoding a glucose transporter having a mature polypeptide sequence comprising or consisting of the amino acid sequence of SEQ ID NO: 361, 362, 363, or 364.

[0845] Paragraph [20]. The recombinant host cell of any one of paragraphs [12]-[19], wherein the cell further comprises a heterologous polynucleotide encoding a non-phosphorylating NADP-dependent glyceraldehyde-3-phosphate dehydrogenase (GAPN).

[0846] Paragraph [21]. The recombinant host cell of paragraph [20], wherein the non-phosphorylating NADP-dependent glyceraldehyde-3-phosphate dehydrogenase (GAPN) has a mature polypeptide sequence with at least 60%, e.g., at least 65%, 70%, 75%, 80%, 85%, 90%, 95%, 97%, 98%, 99%, or 100% sequence identity to any one of SEQ ID NOs: 262-280 and 365-391.

[0847] Paragraph [22]. The recombinant host cell of paragraph [20] or [21], wherein the heterologous polynucleotide encoding a non-phosphorylating NADP-dependent glyceraldehyde-3-phosphate dehydrogenase (GAPN) is operably linked to a promoter that is foreign to the polynucleotide.

[0848] Paragraph [23]. The recombinant host cell of any one of paragraphs [20]-[22], wherein the non-phosphorylating NADP-dependent glyceraldehyde-3-phosphate dehydrogenase (GAPN) has a mature polypeptide sequence that differs by no more than ten amino acids, e.g., by no more than five amino acids, by no more than four amino acids, by no more than three amino acids, by no more than two amino acids, or by one amino acid from any one of SEQ ID NOs: 262-280 and 365-391.

[0849] Paragraph [24]. The recombinant host cell of any one of paragraphs [20]-[23], wherein the non-phosphorylating NADP-dependent glyceraldehyde-3-phosphate dehydrogenase (GAPN) has a mature polypeptide sequence comprising or consisting of the amino acid sequence of any one SEQ ID NOs: 262-280 and 365-391.

[0850] Paragraph [25]. The recombinant host cell of any one of paragraphs [1]-[24], wherein the cell comprises an active pentose fermentation pathway.

[0851] Paragraph [26]. The recombinant host cell of paragraph [25], wherein the cell comprises an active xylose fermentation pathway.

[0852] Paragraph [27]. The recombinant host cell of paragraph [26], wherein the cell comprises one or more active xylose fermentation pathway genes selected from:
[0853] a heterologous polynucleotide encoding a xylose isomerase (X), and
[0854] a heterologous polynucleotide encoding a xylulokinase (XK).

[0855] Paragraph [28]. The recombinant host cell of paragraph [26] or [27], wherein the cell comprises one or more active xylose fermentation pathway genes selected from:
[0856] a heterologous polynucleotide encoding a xylose reductase (XR),
[0857] a heterologous polynucleotide encoding a xylitol dehydrogenase (XDH), and
[0858] a heterologous polynucleotide encoding a xylulokinase (XK).

[0859] Paragraph [29]. The recombinant host cell of paragraph [25], wherein the cell comprises an active arabinose fermentation pathway.

[0860] Paragraph [30]. The recombinant host cell of paragraph [29], wherein the cell comprises one or more active arabinose fermentation pathway genes selected from:
[0861] a heterologous polynucleotide encoding a L-arabinose isomerase (AI),
[0862] a heterologous polynucleotide encoding a L-ribulokinase (RK), and
[0863] a heterologous polynucleotide encoding a L-ribulose-5-P4-epimerase (R5PE).

[0864] Paragraph [31]. The recombinant host cell of paragraph [29] or [30], wherein the cell comprises one or more active arabinose fermentation pathway genes selected from:
[0865] a heterologous polynucleotide encoding an aldose reductase (AR),
[0866] a heterologous polynucleotide encoding a L-arabinitol 4-dehydrogenase (LAD),
[0867] a heterologous polynucleotide encoding a L-xylulose reductase (LXR),
[0868] a heterologous polynucleotide encoding a xylitol dehydrogenase (XDH) and
[0869] a heterologous polynucleotide encoding a xylulokinase (XK).

[0870] Paragraph [32]. The recombinant host cell of any one of paragraphs [1]-[31], wherein the cell comprises an active xylose fermentation pathway and an active arabinose fermentation pathway.

[0871] Paragraph [33]. The recombinant host cell of any one of paragraphs [1]-[32], wherein the cell further comprises a heterologous polynucleotide encoding a glucoamylase.

[0872] Paragraph [34]. The recombinant host cell of paragraph [33], wherein the glucoamylase has a mature polypeptide sequence with at least 60%, e.g., at least 65%, 70%, 75%, 80%, 85%, 90%, 95%, 97%, 98%, 99%, or 100% sequence identity the amino acid sequence of any one of SEQ ID NOs: 8, 102-113, 229, 230 and 244-250.

[0873] Paragraph [35]. The recombinant host cell of paragraph [33] or [34], wherein the heterologous polynucleotide encoding the glucoamylase is operably linked to a promoter that is foreign to the polynucleotide.

[0874] Paragraph [36]. The recombinant host cell of any one of paragraphs [1]-[35], wherein the cell further comprises a heterologous polynucleotide encoding an alpha-amylase.

[0875] Paragraph [37]. The recombinant host cell of paragraph [36], wherein the alpha-amylase has a mature polypeptide sequence with at least 60%, e.g., at least 65%, 70%, 75%, 80%, 85%, 90%, 95%, 97%, 98%, 99%, or 100% sequence identity the amino acid sequence of any one of SEQ ID NOs: 76-101, 121-174, 231 and 251-256.

[0876] Paragraph [38]. The recombinant host cell of paragraph [36] or [37], wherein the heterologous polynucleotide encoding the alpha-amylase is operably linked to a promoter that is foreign to the polynucleotide.

[0877] Paragraph [39]. The recombinant host cell of any one of paragraphs [1]-[38], wherein the cell further comprises a heterologous polynucleotide encoding a phospholipase.

[0878] Paragraph [40]. The recombinant host cell of paragraph [39], wherein the phospholipase has a mature polypeptide sequence with at least 60%, e.g., at least 65%, 70%, 75%, 80%, 85%, 90%, 95%, 97%, 98%, 99%, or 100% sequence identity the amino acid sequence of any one of SEQ ID NOs: 235, 236, 237, 238, 239, 240, 241 and 242.

[0879] Paragraph [41]. The recombinant host cell of paragraph [39] or [40], wherein the heterologous polynucleotide encoding the phospholipase is operably linked to a promoter that is foreign to the polynucleotide.

[0880] Paragraph [42]. The recombinant host cell of any one of paragraphs [1]-[41], wherein the cell further comprises a heterologous polynucleotide encoding a trehalase.

[0881] Paragraph [43]. The recombinant host cell of paragraph [42], wherein the trehalase has a mature polypeptide sequence with at least 60%, e.g., at least 65%, 70%, 75%, 80%, 85%, 90%, 95%, 97%, 98%, 99%, or 100% sequence identity the amino acid sequence of any one of SEQ ID NOs: 175-226.

[0882] Paragraph [44]. The recombinant host cell of paragraph [42] or [43], wherein the heterologous polynucleotide encoding the trehalase is operably linked to a promoter that is foreign to the polynucleotide.

[0883] Paragraph [45]. The recombinant host cell of any one of paragraphs [1]-[44], wherein the cell further comprises a heterologous polynucleotide encoding a protease.

[0884] Paragraph [46]. The recombinant host cell of paragraph [45], wherein the protease has a mature polypeptide sequence with at least 60%, e.g., at least 65%, 70%, 75%, 80%, 85%, 90%, 95%, 97%, 98%, 99%, or 100% sequence identity the amino acid sequence of any one of SEQ ID NOs: 9-73.

[0885] Paragraph [47]. The recombinant host cell of paragraph [45] or [46], wherein the heterologous polynucleotide encoding the protease is operably linked to a promoter that is foreign to the polynucleotide.

[0886] Paragraph [48]. The recombinant host cell of any one of paragraphs [1]-[47], wherein the cell further comprises a heterologous polynucleotide encoding a pullulanase.

[0887] Paragraph [49]. The recombinant host cell of paragraph [48], wherein the pullulanase has a mature polypeptide sequence with at least 60%, e.g., at least 65%, 70%, 75%, 80%, 85%, 90%, 95%, 97%, 98%, 99%, or 100% sequence identity the amino acid sequence of any one of SEQ ID NOs: 114-120.

[0888] Paragraph [50]. The recombinant host cell of paragraph [48] or [49], wherein the heterologous polynucleotide encoding the pullulanase is operably linked to a promoter that is foreign to the polynucleotide.

[0889] Paragraph [51]. The recombinant host cell of any one of paragraphs [1]-[50], wherein the cell further comprises a heterologous polynucleotide encoding a transketolase (TKL1).

[0890] Paragraph [52]. The recombinant host cell of any one of paragraphs [1]-[51], wherein the cell further comprises a heterologous polynucleotide encoding a transaldolase (TAL1).

[0891] Paragraph [53]. The recombinant host cell of any one of paragraphs [1]-[52], wherein the cell further comprises a disruption to an endogenous gene encoding a glycerol 3-phosphate dehydrogenase (GPD).

[0892] Paragraph [54]. The recombinant host cell of any one of paragraphs [1]-[53], wherein the cell further comprises a disruption to an endogenous gene encoding a glycerol 3-phosphatase (GPP).

[0893] Paragraph [55]. The recombinant host cell of any one of paragraphs [1]-[54], wherein the cell is capable of higher ethanol production compared to the same cell without the heterologous polynucleotide encoding the glycerol transporter under the same conditions (e.g., after 40 hours of fermentation).

[0894] Paragraph [56]. The recombinant host cell of any one of paragraphs [1]-[55], wherein the cell is capable of higher ethanol production compared to the same cell without the heterologous polynucleotide encoding the glucose transporter under the same conditions (e.g., after 40 hours of fermentation).

[0895] Paragraph [57]. The recombinant host cell of any one of paragraphs [1]-[56], wherein the cell is capable of higher ethanol production compared to the same cell without the heterologous polynucleotide encoding the non-phosphorylating NADP-dependent glyceraldehyde-3-phosphate dehydrogenase (GAPN) under the same conditions (e.g., after 40 hours of fermentation).

[0896] Paragraph [58]. The recombinant host cell of any one of paragraphs [1]-[57], wherein the cell is a yeast cell.

[0897] Paragraph [59]. The recombinant host cell of any one of paragraphs [1]-[58], wherein the cell is a Saccharomyces, Rhodotorula, Schizosaccharomyces, Kluyveromyces, Pichia, Hansenula, Rhodosporidium, Candida, Yarrowia, Lipomyces, Cryptococcus, or Dekkera sp. cell.

[0898] Paragraph [60]. The recombinant host cell of any one of paragraphs [1]-[59], wherein the cell is a Saccharomyces cerevisiae cell.

[0899] Paragraph [61]. A composition comprising the recombinant host cell of any one of paragraphs [1]-[60] and one or more naturally occurring and/or non-naturally occurring components, such as components are selected from the group consisting of: surfactants, emulsifiers, gums, swelling agents, and antioxidants.

[0900] Paragraph [62]. A co-culture comprising the recombinant host cell of any one of paragraphs [1]-[60].

[0901] Paragraph [63]. A method of producing a derivative of a recombinant host cell of any one of paragraphs [1]-[60], the method comprising:
[0902] (a) providing:
   [0903] (i) a first host cell; and
   [0904] (ii) a second host cell, wherein the second host cell is a recombinant host cell of any one of paragraphs [1]-[60];
[0905] (b) culturing the first host cell and the second host cell under conditions which permit combining of DNA between the first and second host cells;
[0906] (c) screening or selecting for a derived host cell.

[0907] Paragraph [64]. A method of producing a fermentation product from a starch-containing or cellulosic-containing material, the method comprising:
[0908] (a) saccharifying the starch-containing or cellulosic-containing material; and
[0909] (b) fermenting the saccharified material of step (a) with the recombinant host cell of any one of paragraphs [1]-[60] under suitable conditions to produce the fermentation product.

[0910] Paragraph [65]. The method of paragraph [64], wherein saccharification of step (a) occurs on a starch-containing material, and wherein the starch-containing material is either gelatinized or ungelatinized starch.

[0911] Paragraph [66]. The method of paragraph [65], comprising liquefying the starch-containing material by contacting the material with an alpha-amylase prior to saccharification.

[0912] Paragraph [67]. The method of paragraph [64] or [65], wherein liquefying the starch-containing material and/or saccharifying the starch-containing material is conducted in presence of exogenously added protease.

[0913] Paragraph [68]. The method of any one of paragraphs [64]-[67], wherein fermentation is performed under reduced nitrogen conditions (e.g., less than 1000 ppm urea or ammonium hydroxide, such as less than 750 ppm, less than 500 ppm, less than 400 ppm, less than 300 ppm, less than 250 ppm, less than 200 ppm, less than 150 ppm, less than 100 ppm, less than 75 ppm, less than 50 ppm, less than 25 ppm, or less than 10 ppm).

[0914] Paragraph [69]. The method of any one of paragraphs [64]-[68], wherein fermentation and saccharification are performed simultaneously in a simultaneous saccharification and fermentation (SSF).

[0915] Paragraph [70]. The method of any one of paragraphs [64]-[68], wherein fermentation and saccharification are performed sequentially (SHF).

[0916] Paragraph [71]. The method of any one of paragraphs [64]-[70], comprising recovering the fermentation product from the fermentation.

[0917] Paragraph [72]. The method of paragraph [71], wherein recovering the fermentation product from the fermentation comprises distillation.

[0918] Paragraph [73]. The method of any one of paragraphs [64]-[72], wherein the fermentation product is ethanol.

[0919] Paragraph [74]. The method of any one of paragraphs [64]-[73], wherein step (a) comprises contacting the cellulosic and/or starch-containing with an enzyme composition.

[0920] Paragraph [75]. The method of any one of paragraphs [64]-[74], wherein saccharification occurs on a cellulosic material, and wherein the cellulosic material is pretreated.

[0921] Paragraph [76]. The method of paragraph [75], wherein the pretreatment is a dilute acid pretreatment.

[0922] Paragraph [77]. The method of paragraph [75] or [76], wherein saccharification occurs on a cellulosic material, and wherein step (a) comprises contacting the cellulosic enzyme composition, and wherein the enzyme composition comprises one or more enzymes selected from a cellulase, an AA9 polypeptide, a hemicellulase, a CIP, an esterase, an expansin, a ligninolytic enzyme, an oxidoreductase, a pectinase, a protease, and a swollenin.

[0923] Paragraph [78]. The method of paragraph [77], wherein the cellulase is one or more enzymes selected from an endoglucanase, a cellobiohydrolase, and a beta-glucosidase.

[0924] Paragraph [79]. The method of paragraph [77] or [78], wherein the hemicellulase is one or more enzymes selected a xylanase, an acetylxylan esterase, a feruloyl esterase, an arabinofuranosidase, a xylosidase, and a glucuronidase.

[0925] Paragraph [80]. The method of any one of paragraphs [64]-[79], wherein the method results in higher yield of fermentation product when compared to the method using the same cell without the heterologous polynucleotide encoding the glycerol transporter under the same conditions (e.g., after 40 hours of fermentation).

[0926] Paragraph [81]. The method of paragraph [80], wherein the method results in at least 0.25% (e.g., 0.5%, 0.75%, 1.0%, 1.25%, 1.5%, 1.75%, 2%, 3% or 5%) higher yield of fermentation product.

[0927] Paragraph [82]. The method of any one of paragraphs [64]-[81], wherein the method results in higher yield of fermentation product when compared to the method using the same cell without the heterologous polynucleotide encoding the glucose transporter under the same conditions (e.g., after 40 hours of fermentation).

[0928] Paragraph [83]. The method of paragraph [82], wherein the method results in at least 0.25% (e.g., 0.5%, 0.75%, 1.0%, 1.25%, 1.5%, 1.75%, 2%, 3% or 5%) higher yield of fermentation product.

[0929] Paragraph [84]. The method of any one of paragraphs [64]-[83], wherein the method results in higher yield of fermentation product when compared to the method using the same cell without the heterologous polynucleotide encoding the non-phosphorylating NADP-dependent glyceraldehyde-3-phosphate dehydrogenase (GAPN) under the same conditions (e.g., after 40 hours of fermentation).

[0930] Paragraph [85]. The method of paragraph [84], wherein the method results in at least 0.25% (e.g., 0.5%, 0.75%, 1.0%, 1.25%, 1.5%, 1.75%, 2%, 3% or 5%) higher yield of fermentation product.

[0931] Paragraph [86]. The method of any one of paragraphs [64]-[85], wherein fermentation is conducted under low oxygen (e.g., anaerobic) conditions.

[0932] Paragraph [87]. The method of any one of paragraphs [64]-[86], wherein the method results in reduced glycerol production when compared to the method using the same cell without the heterologous polynucleotide encoding the glycerol transporter under the same conditions (e.g., after 40 hours of fermentation).

[0933] Paragraph [88]. The method of any one of paragraphs [64]-[87], wherein the method results in reduced glycerol production when compared to the method using the same cell without the heterologous polynucleotide encoding the non-phosphorylating NADP-dependent glyceraldehyde-3-phosphate dehydrogenase (GAPN) under the same conditions (e.g., after 40 hours of fermentation).

[0934] Paragraph [89]. Use of a recombinant host cell of any one of paragraphs [1]-[60] in the production of ethanol.

[0935] The invention described and claimed herein is not to be limited in scope by the specific aspects or embodiments herein disclosed, since these aspects/embodiments are intended as illustrations of several aspects of the invention. Any equivalent aspects are intended to be within the scope of this invention. Indeed, various modifications of the invention in addition to those shown and described herein will become apparent to those skilled in the art from the foregoing description. Such modifications are also intended to fall within the scope of the appended claims. In the case of conflict, the present disclosure including definitions will control. All references are specifically incorporated by reference for that which is described.

[0936] The following examples are offered to illustrate certain aspects/embodiments of the present invention, but not in any way intended to limit the scope of the invention as claimed.

### EXAMPLES

### Materials and Methods

[0937] Chemicals used as buffers and substrates were commercial products of at least reagent grade.

[0938] Yeast strain MBG5321 is a S. cerevisiae yeast prepared according to breeding methods described in U.S. Pat. No. 8,257,959.

[0939] Yeast strains MEJ1797 and YS114-G11 were prepared from MBG5012 (WO2019/161227) and MBG5321, respectively, further expressing a Pycnopous sanguineus glucoamylase (SEQ ID NO: 4 of WO2011/066576) and a hybrid Rhizomucor pusillus alpha amylase expression cassette (as described in WO2013/006756).

### Example 1: Construction of Yeast Strains Expressing a Heterologous Glycerol Transporter Under Control of the Yeast TEF2 Promoter

[0940] This example describes the construction of yeast cells expressing a heterologous glycerol transporter under control of an S. cerevisiae TEF2 promoter. Four pieces of DNA that together contain the promoter, gene and terminator were designed to allow for homologous recombination between the four DNA fragments and into the XII-2 locus of the yeast MEJ1797 (See, Mikkelsen et al. Metabolic Engineering v14 (2012) pp 104-111). The resulting strain has the TEF2 promoter (SEQ ID NO: 2), the glycerol transporter, and the TEF1 terminator (SEQ ID NO: 233) integrated into the S. cerevisiae genome at the XII-2 locus.

### Construction of the Promoter Containing Fragment (Fragment 1)

[0941] A plasmid containing a synthetic, sequence verified nucleotide insertion containing 500 bp homology to the XII-2 site followed by the S. cerevisiae promoter TEF2 was synthesized by Thermo Fisher Scientific and designated ‘HP34 plasmid’ (FIG. 2; SEQ ID NO: 326). To generate linear DNA for transformation into yeast, the ‘HP34 plasmid’ DNA was PCR amplified using primers 1230183+1230198 that anneal to the 5′ and 3′ ends of the insertion DNA in ‘HP34 plasmid’. Following thermocycling, the PCR reaction products were cleaned using the NucleoSpin Gel and PCR clean-up kit (Machery-Nagel). The resulting linear DNA was designated HP34.

(SEQ ID NO: 324)
Primer 1230183 = 5′-TCTTT TCGCG CCCTG GAAA-3′
(SEQ ID NO: 325)
Primer 1230198 = 5′-TTTGT TCTAG CTTAA TTATA GTTCG
TTGAC CGTAT ATTC-3′

### Construction of the TEF2 Promoter Homology and 5′ Transporter Containing Fragment (Fragment 2)

[0942] Synthetic linear uncloned DNAs containing 50 bp of homology to the 3′ end of the TEF2 promoter followed by the 5′ region of the glycerol transporter of interest were designed and obtained from either Twist or Thermo Fisher Scientific. Since these fragments are in the second position of the expression cassette as described below, they are referred to as fragment 2.

### Construction of the 3′ Transporter and TEF1 Terminator Homology Fragment (Fragment 3)

[0943] Synthetic linear uncloned DNAs containing the 3′ region of the glycerol transporter of interest, the stop codon, and 50 bp of homology to the 5′ end of the TEF1 terminator were designed and obtained from either Twist or Thermo Fisher Scientific. Since these fragments are in the third position of the expression cassette as described below, they are referred to as fragment 3.

### Construction of the Terminator Containing Fragment (Fragment 4)

[0944] A plasmid containing a synthetic, sequence verified nucleotide insertion containing the S. cerevisiae terminator TEF1 followed by 500 bp homology to the XII-2 site was synthesized by Thermo Fisher Scientific and designated ‘TH13 plasmid’ (FIG. 3; SEQ ID NO: 353). To generate linear DNA for transformation into yeast, the ‘TH13 plasmid’ DNA was PCR amplified using primers 1230178+1230216 that anneal to the 5′ and 3′ ends of the insertion DNA in ‘TH13 plasmid’. Following thermocycling, the PCR reaction products were cleaned using the NucleoSpin Gel and PCR clean-up kit (Machery-Nagel). The resulting linear DNA was designated TH13.

(SEQ ID NO: 351)
Primer 1230178 = 5′-GGAGA TTGAT AAGAC TTTTC TAGTT
GCATA TC-3′
(SEQ ID NO: 352)
Primer 1230216 = 5′-TCAGT CCAAT GACAG TATTT TCTCC
TTCTC AC-3′

Integration of Fragments 1-4 to Generate Yeast Strains with a Heterologous Glycerol Transporter Under Control of the TEF2 Promoter

[0945] The yeast MEJ1797 was transformed with DNA fragments 1-4 described above. Each transformation contained HP34 (fragment 1), one synthetic DNA fragment 2 encoding the 5′ portion of a glycerol transporter, the corresponding fragment 3 encoding the 3′ portion of the same glycerol transporter, and TH13 (fragment 4). Equimolar amounts of the four linear DNAs were included for each transformation with 100 ng of the largest DNA. To aid homologous recombination of the four fragments at the genomic XII-2 site, a plasmid containing Mad7 and guide RNA specific to XII-2 (pMLBA638; FIG. 1) was also used in the transformation. These five components were transformed into the into S. cerevisiae strain Innova Force following a yeast electroporation protocol (Thompson et al. Yeast. 1998 Apr. 30; 14(6):565-71). Transformants were selected on YPD+clonNAT to select for transformants that contain the CRISPR/Mad7 plasmid pMLBA638. Transformants were picked using a Q-pix Colony Picking System (Molecular Devices) to inoculate 1 well of 96-well plate containing YPD+clonNAT media. The plates were grown for 2 days then glycerol was added to 20% final concentration and the plates were stored at −80° C. until needed. Integration of the specific glycerol transporter construct was verified by PCR with locus specific primers and subsequent sequencing of the PCR product. Sequence verified isolates were hit-picked to a new plate and glycerol stocks prepared as above. The strains generated from this method are shown in Table 9.

TABLE 9

| | fragment 1 | fragment 2 | fragment 3 | fragment 4 | donor organism | strain name |
|---|---|---|---|---|---|---|
| 1 | HP34 | pTEF2_BGE51665 | 3p_BGE51665 | TH13 | Zygosaccharomyces | BGE51665 |
| | (SEQ ID NO: 326) | (SEQ ID NO: 327) | (SEQ ID NO: 339) | (SEQ ID NO: 353) | rouxii | |
| 2 | HP34 | pTEF2_BBV22932 | 3p_BBV22932 | TH13 | Schizosaccharomyces | BBV22932 |
| | (SEQ ID NO: 326) | (SEQ ID NO: 328) | (SEQ ID NO: 340) | (SEQ ID NO: 353) | pombe | |
| 3 | HP34 | pTEF2_BFW20975 | 3p_BFW20975 | TH13 | Millerozyma farinosa | BFW20975 |
| | (SEQ ID NO: 326) | (SEQ ID NO: 329) | (SEQ ID NO: 341) | (SEQ ID NO: 353) | | |
| 4 | HP34 | pTEF2_A0A3B3QJ49 | 3p_A0A3B3QJ49 | TH13 | Paramormyrops | A0A3B3QJ49 |
| | (SEQ ID NO: 326) | (SEQ ID NO: 330) | (SEQ ID NO: 342) | (SEQ ID NO: 353) | kingsleyae | |
| 5 | HP34 | pTEF2_BBV22935 | 3p_BBV22935 | TH13 | Xenopus (Silurana) | BBV22935 |
| | (SEQ ID NO: 326) | (SEQ ID NO: 331) | (SEQ ID NO: 343) | (SEQ ID NO: 353) | tropicalis | |
| 6 | HP34 | pTEF2_BBV22933 | 3p_BBV22933 | TH13 | Plasmodium | BBV22933 |
| | (SEQ ID NO: 326) | (SEQ ID NO: 332) | (SEQ ID NO: 344) | (SEQ ID NO: 353) | falciparum | |
| 7 | HP34 | pTEF2_BGE32929 | 3p_BGE32929 | TH13 | Millerozyma farinosa | BGE32929 |
| | (SEQ ID NO: 326) | (SEQ ID NO: 333) | (SEQ ID NO: 345) | (SEQ ID NO: 353) | | |
| 8 | HP34 | pTEF2_Q8JG68 | 3p_Q8JG68 | TH13 | Xenopus laevis | Q8JG68 |
| | (SEQ ID NO: 326) | (SEQ ID NO: 334) | (SEQ ID NO: 346) | (SEQ ID NO: 353) | | |
| 9 | HP34 | pTEF2_EFPBZ6P62 | 3p_EFPBZ6P62 | TH13 | Torulaspora | EFPBZ6P62 |
| | (SEQ ID NO: 326) | (SEQ ID NO: 335) | (SEQ ID NO: 347) | (SEQ ID NO: 353) | delbrueckii | |
| 10 | HP34 | pTEF2_EFP6VCJJF | 3p_EFP6VCJJF | TH13 | Debaryomyces | EFP6VCJJF |
| | (SEQ ID NO: 326) | (SEQ ID NO: 336) | (SEQ ID NO: 348) | (SEQ ID NO: 353) | castellii | |
| 11 | HP34 | pTEF2_BGE51664 | 3p_BGE51664 | TH13 | Danio rerio | BGE51664 |
| | (SEQ ID NO: 326) | (SEQ ID NO: 337) | (SEQ ID NO: 349) | (SEQ ID NO: 353) | | |
| 12 | HP34 | pTEF2_A0A093NZE6 | 3p_A0A093NZE6 | TH13 | Pygoscelis adeliae | A0A093NZE6 |
| | (SEQ ID NO: 326) | (SEQ ID NO: 338) | (SEQ ID NO: 350) | (SEQ ID NO: 353) | | |

### Example 2: 96-Well Corn Mash Fermentation Assay of Yeast Strains Expressing a Heterologous Glycerol Transporter

[0946] Propagation plates were prepared by inoculating 5 uL of each strain from Example 1 (or control strain MEJ1797) into a 96-well seed plate containing 150 uL YP+2% glucose medium per well. Plates were incubated at 30° C. and 300 RPM overnight. The next day, 30 uL of the seed culture was transferred to 96-deep well plates containing 500 uL of industrial corn mash supplemented with 600 ppm urea and 0.3 AGU/g Spirizyme® Ultra L (Novozymes A/S). Plates were sealed with EnzyScreen plate covers (EnzyScreen BV) and tightly clamped to limit oxygen transfer. Corn mash plates were incubated statically at 32° C. for 68 hours. After fermentation was completed, the plates were placed at −80° C. for about 10 minutes before 100 uL of 8% H₂SO₄ was added to each well of the 96-deep well corn mash plates. Plates were sealed and mixed by inversion and centrifuged at 3000 RPM for 10 minutes. Supernatants were removed and diluted to 6.66× in sterile deionized water prior to HPLC analysis. The results for ethanol production (g/L) and glycerol production (g/L) are shown in FIGS. 4 and 5, respectively.

### Example 3: Impact of Expressing of Glycerol Transporters in Yeast on Ethanol Fermentation Using Corn Mash Produced Industrially by a Liquefaction Blend

[0947] This example describes the evaluation of yeast strains expressing genes encoding transporters involved in glycerol uptake. Particularly, the impact on final ethanol titer and generation of fermentation by-products during ethanol fermentation with an industrially prepared corn mash is compared among the yeast strains listed in Table 10.

TABLE 10
Strains used in fermentation

Meji797 (control)
BGE51665
BFW20975
EFP6VCJJF
EFPBZ6P62
BBV22932

### Seed Culture:

[0948] Cryo-preserved cultures of strains were first grown in liquid YPD media (Yeast extract, 10 g. Peptone, 20 g. Dextrose, 60 g. dissolve in 1 L of distilled water). Cultivation was done aseptically in a sterile 125-ml Erlenmeyer flask filled with 50 ml YPD media and inoculated with 100 μl of cryo-preserved culture. Flasks were incubated in a shaking incubator at 32° C. for 16 h with shaking at 150 rpm. The YPD grown seed cultures (40 ml) were centrifuged at 3,500 rpm for 10 min at 22° C., and the resulting cell pellet was washed and resuspended in tap water. The resuspended cells were used to inoculate the corn mash at the beginning of simultaneous saccharification and fermentation (SSF).

### Corn Mash:

[0949] Industrially prepared corn mash liquefied with a commercially available enzyme (Avantec Amp) from Novozymes A/S containing an alpha-amylase and a protease was obtained from an ethanol plant. The mash contained 35% dried solids as measured by Mettler-Toledo HB43-S moisture balance. The mash was supplemented with 2 ppm of antibiotic LACTROL™ and its pH was adjusted to 5.0 prior to use in SSF. No urea was added to mash.

### Simultaneous Saccharification and Fermentation (SSF)

[0950] All fermentations were carried out in 2-ml plastic test tubes with caps having a 0.5 mm hole. Tubes were filled with 4-5 g corn mash and inoculated with resuspended seed culture at 10 million cells per gram of mash. A commercially available glucoamylase enzyme blend (Innova® Ultra L) was added to flasks at 0.0368% (w/w) of dry corn solids. Fermentation was run for 54-65 h. Samples were taken at the end of fermentation to analyze ethanol and fermentation by-products in the fermented corn mash.

Ethanol and Fermentation by-Products Analysis

[0951] At the end of fermentation 50 μL of 40% v/v H₂SO₄ was added to fermentation tubes. Tubes were then vortexed and centrifuged at 3,500 rpm for 10 min at 22° C. The resulting supernatant was filtered through a 0.2 μm syringe filter. Filtered samples were stored at 4° C. prior to and during HPLC analysis. Analysis of ethanol and other fermentation by-products was conducted using an HPLC (Agilent 1100/1200 series) machine equipped with a guard column (Bio-Rad, Micro-Guard Cation H+ Cartridge, 30×4.6 mm) and an analytical column (Bio-Rad, Aminex HPX-87H, 300×7.8 mm) using 5 mM Sulfuric Acid as a mobile phase with a flow rate of 0.8 mL/min. Column temperature was maintained at 65° C., and metabolites were detected using a Refractive Index detector at 55° C.

### Results

[0952] Expression of glycerol transporters can affect the fermentation performance of yeast strains compared to control (the host strain not expressing any glycerol transporter). FIG. 6 shows the final ethanol titers of corn mash fermentation by the yeast strains expressing different glycerol transporters in comparison to the control as listed in Table 10. All the tested glycerol transporter-expressing yeast strains produce more ethanol compared to the control. As shown in FIG. 7, expression of glycerol transporters by strains impacts formation of glycerol, a fermentation by-product that affects ethanol yield, in comparison to the control. Glycerol transporter-expressing strains BGE51665, BFW20975, EFPV6CJJF, and EFPBZ6P62 produce less glycerol compared to the control, whereas strain BBV22932 generate slightly more glycerol than control. Furthermore, formation of succinic acid, another fermentation by-product, is influenced by the expression of glycerol transporters in yeast. Compared to control, strains BGE51665, BFW20975 and EFPV6CJJF expressing a glycerol transporter exhibit lower concentration of succinic acid at the end of fermentation, whereas strains EFPBZ6P62 and BBV22932 produce more succinic acid (FIG. 8). Additionally, glycerol transporter-expressing strains exhibit a different fingerprint of acetic acid at the end of fermentation compared to control (FIG. 9). BGE51665, BFW20975, EFPV6CJJF and BBV22932 produce more acetic acid than control, and strain EFPBZ6P62 generates less acetic acid compared to control.

### Example 4: Impact of Expressing of Glycerol Transporters in Yeast on Ethanol Fermentation Using Corn Mash Produced Industrially by a Liquefaction Blend

[0953] This example describes the evaluation of yeast strains expressing genes encoding transporters involved in glycerol uptake. Particularly, the impact on final ethanol titer and generation of fermentation by-products during ethanol fermentation with an industrially prepared corn mash is compared among the yeast strains listed in Table 11.

TABLE 11
Strains used in fermentation

Meji797 (control)
BGE51665
BFW20975
EFP6VCJJF

### Seed Culture:

[0954] Cryo-preserved cultures of strains were first grown in liquid YPD media (Yeast extract, 10 g. Peptone, 20 g. Dextrose, 60 g. dissolve in 1 L of distilled water). Cultivation was done aseptically in a sterile 125-ml Erlenmeyer flask filled with 50 ml YPD media and inoculated with 100 μl of cryo-preserved culture. Flasks were incubated in a shaking incubator at 32° C. for 16 h with shaking at 150 rpm. The YPD grown seed cultures (40 ml) were centrifuged at 3,500 rpm for 10 min at 22° C., and the resulting cell pellet was washed and resuspended in tap water. The resuspended cells were used to inoculate the corn mash at the beginning of simultaneous saccharification and fermentation (SSF).

### Corn Mash:

[0955] Industrially prepared corn mash liquefied with a commercially available enzyme (Liquozyme Pro) from Novozymes A/S containing an alpha-amylase and a protease was obtained from an ethanol plant. The mash contained 32% dried solids as measured by Mettler-Toledo HB43-S moisture balance. The mash was supplemented with 500 ppm of urea and 2 ppm of antibiotic LACTROL™ and its pH was adjusted to 5.0 prior to use in SSF.

### Simultaneous Saccharification and Fermentation (SSF)

[0956] Fermentations were carried out in 125-ml baffled flasks with screw caps having a 0.5 mm hole. Flasks were filled with 40-50 g corn mash and inoculated with resuspended seed culture at 10 million cells per gram of mash. A commercially available glucoamylase enzyme blend (Innova® Ultra L) was added to flasks at 0.0368% (w/w) of dry corn solids. Fermentation was run for 54-65 h. Samples were taken at the end of fermentation to analyze ethanol and fermentation by-products in the fermented corn mash.

Ethanol and Fermentation by-Products Analysis

[0957] Samples (5 g) removed from flasks at the end of fermentation were transferred into 15 ml conical tubes containing 50 μL of 40% v/v H₂SO₄, vortexed, and centrifuged at 3,500 rpm for 10 min at 22° C. The resulting supernatant was filtered through a 0.2 μm syringe filter. Filtered samples were stored at 4° C. prior to and during HPLC analysis. Analysis of ethanol and other fermentation by-products was conducted using an HPLC (Agilent 1100/1200 series) machine equipped with a guard column (Bio-Rad, Micro-Guard Cation H+ Cartridge, 30×4.6 mm) and an analytical column (Bio-Rad, Aminex HPX-87H, 300×7.8 mm) using 5 mM Sulfuric Acid as a mobile phase with a flow rate of 0.8 mL/min. Column temperature was maintained at 65° C., and metabolites were detected using a Refractive Index detector at 55° C.

### Results

[0958] Expression of glycerol transporters in yeast can improve the production of ethanol and reduces the formation of by-products during fermentation of corn mash. FIG. 10 shows the final ethanol titers of corn mash fermentation by yeast strains expressing different glycerol transporters and the control as listed in Table 11. Three glycerol transporter-expressing yeast strains tested in this example (BGE51665, BFW20975 and EFPV6CJJF) produce more ethanol than does the control. Increase in ethanol titer because of glycerol transporter expression is attributed to the lower formation of fermentation by-products. As shown in FIG. 11, glycerol transporter-expressing strains BGE51665, BFW20975 and EFPV6CJJF produce less glycerol by the end of fermentation compared to the control. Strains BGE51665, BFW20975 and EFPV6CJJF also exhibit lower concentration of succinic acid at the end of fermentation than does the control (FIG. 12). Additionally, glycerol transporter-expressing strains generates less acetic acid compared to control (FIG. 13).

### Example 5: Impact of Expressing of Glycerol Transporters in Yeast on Ethanol Fermentation Using Corn Mash Produced Industrially by a Liquefaction Blend

[0959] This example describes the evaluation of yeast strains expressing genes encoding transporters involved in glycerol uptake. Particularly, the impact on final ethanol titer and generation of fermentation by-products during ethanol fermentation with an industrially prepared corn mash is compared among the yeast strains listed in Table 12.

TABLE 12
Strains used in fermentation

Meji797 (control)
BGE51665
BFW20975

### Seed Culture:

[0960] Cryo-preserved cultures of strains were first grown in liquid YPD media (Yeast extract, 10 g. Peptone, 20 g. Dextrose, 60 g. dissolve in 1 L of distilled water). Cultivation was done aseptically in a sterile 125-ml Erlenmeyer flask filled with 50 ml YPD media and inoculated with 100 μl of cryo-preserved culture. Flasks were incubated in a shaking incubator at 32° C. for 16 h with shaking at 150 rpm. The YPD grown seed cultures (40 ml) were centrifuged at 3,500 rpm for 10 min at 22° C., and the resulting cell pellet was washed and resuspended in tap water. The resuspended cells were used to inoculate the corn mash at the beginning of simultaneous saccharification and fermentation (SSF).

### Corn Mash:

[0961] Industrially prepared corn mash liquefied with a commercially available enzyme (Liquozyme Pro) from Novozymes A/S containing an alpha-amylase and a protease was obtained from an ethanol plant. The mash contained 34% dried solids as measured by Mettler-Toledo HB43-S moisture balance. The mash was supplemented with 500 ppm of urea and 2 ppm of antibiotic LACTROL™ and its pH was adjusted to 5.0 prior to use in SSF.

### Simultaneous Saccharification and Fermentation (SSF)

[0962] Fermentations were carried out in 125-ml baffled flasks with screw caps having a 0.5 mm hole. Flasks were filled with 40-50 g corn mash and inoculated with resuspended seed culture at 10 million cells per gram of mash. A commercially available glucoamylase enzyme blend (Innova® Ultra L) was added to flasks at 0.0368% (w/w) of dry corn solids. Fermentation was run for 54-65 h. Samples were taken at the end of fermentation to analyze ethanol and fermentation by-products in the fermented corn mash.

Ethanol and Fermentation by-Products Analysis

[0963] Samples (5 g) removed from flasks during the fermentation were transferred into 15 ml conical tubes containing 50 μL of 40% v/v H₂SO₄, vortexed, and centrifuged at 3,500 rpm for 10 min at 22° C. The resulting supernatant was filtered through a 0.2 μm syringe filter. Filtered samples were stored at 4° C. prior to and during HPLC analysis. Analysis of ethanol and other fermentation by-products was conducted using an HPLC (Agilent 1100/1200 series) machine equipped with a guard column (Bio-Rad, Micro-Guard Cation H+ Cartridge, 30×4.6 mm) and an analytical column (Bio-Rad, Aminex HPX-87H, 300×7.8 mm) using 5 mM Sulfuric Acid as a mobile phase with a flow rate of 0.8 mL/min. Column temperature was maintained at 65° C., and metabolites were detected using a Refractive Index detector at 55° C.

### Results

[0964] The resulting profiles for ethanol, glycerol, succinic acid, and acetic acid for the strains of Table 12 are shown in FIGS. 14, 16, 17 and 18, respectively. The final ethanol concentration for the strains of Table 12 are shown in FIG. 15.

### Example 6: Construction of Yeast Strains Expressing a Heterologous Glucose Transporter Under Control of the Yeast TEF2 Promoter

[0965] This example describes the construction of yeast cells containing a heterologous glucose transporter under control of an S. cerevisiae TEF2 promoter. Four pieces of DNA that together contain the promoter, gene and terminator were designed to allow for homologous recombination between the four DNA fragments and into the XII-2 locus of the yeast MEJI797 (See, Metabolic Engineering v14 (2012) pp 104-111). The resulting strain has the TEF2 promoter (SEQ ID NO: 2), the glucose transporter coding sequence, and the TEF1 terminator (SEQ ID NO: 233) integrated into the S. cerevisiae genome at the XII-2 locus.

[0966] Construction of the promoter containing fragment (fragment 1) A plasmid containing a synthetic, sequence verified nucleotide insertion containing 500 bp homology to the XII-2 site followed by the S. cerevisiae promoter TEF2 (sequence?) was synthesized by Thermo Fisher Scientific and was designated ‘HP34 plasmid’ (FIG. 2; SEQ ID NO: 326). To generate linear DNA for transformation into yeast, the ‘HP34 plasmid’ DNA was PCR amplified using primers 1230183+1230198 (supra) that anneal to the 5′ and 3′ ends of the insertion DNA in ‘HP34 plasmid’. Following thermocycling, the PCR reaction products were cleaned using the NucleoSpin Gel and PCR clean-up kit (Machery-Nagel). The resulting linear DNA was designated HP34.

### Construction of the TEF2 Promoter Homology and 5′ Transporter Containing Fragment (Fragment 2)

[0967] Synthetic linear uncloned DNAs containing 50 bp of homology to the 3′ end of the TEF2 promoter followed by the 5′ region of the glucose transporter of interest were designed and obtained from either Twist or Thermo Fisher Scientific. Since these fragments are in the second position of the expression cassette as described below, they are referred to as fragment 2.

### Construction of the 3′ Transporter and TEF1 Terminator Homology Fragment (Fragment 3)

[0968] Synthetic linear uncloned DNAs containing the 3′ region of the glucose transporter of interest, the stop codon, and 50 bp of homology to the 5′ end of the TEF1 terminator were designed and obtained from either Twist or Thermo Fisher Scientific. Since these fragments are in the third position of the expression cassette as described below, they are referred to as fragment 3.

### Construction of the Terminator Containing Fragment (Fragment 4)

[0969] A plasmid containing a synthetic, sequence verified nucleotide insertion containing the S. cerevisiae terminator TEF1 followed by 500 bp homology to the XII-2 site was synthesized by Thermo Fisher Scientific and designated ‘TH13 plasmid’ (FIG. 3; SEQ ID NO: 353). To generate linear DNA for transformation into yeast, the ‘TH13 plasmid’ DNA was PCR amplified using primers 1230178+1230216 (supra) that anneal to the 5′ and 3′ ends of the insertion DNA in ‘TH13 plasmid’. Following thermocycling, the PCR reaction products were cleaned using the NucleoSpin Gel and PCR clean-up kit (Machery-Nagel). The resulting linear DNA was designated TH13.

Integration of Fragments 1-4 to Generate Yeast Strains with a Heterologous Glucose Transporter Under Control of the TEF2 Promoter

[0970] The yeast MEJI797 was transformed with DNA fragments 1-4 described above. Each transformation contained HP34 (fragment 1), one synthetic DNA fragment 2 encoding the 5′ portion of a glucose transporter, the corresponding fragment 3 encoding the 3′ portion of the same glucose transporter, and TH13 (fragment 4). Equimolar amounts of the four linear DNAs were included for each transformation with 100 ng of the largest DNA. To aid homologous recombination of the four fragments at the genomic XII-2 site, a plasmid containing Mad7 and guide RNA specific to XII-2 (pMLBA638; FIG. 1) was also used in the transformation. These five components were transformed into the into S. cerevisiae strain Innova Force following a yeast electroporation protocol (Thompson et al. Yeast. 1998 Apr. 30; 14(6):565-71). Transformants were selected on YPD+clonNAT to select for transformants that contain the CRISPR/Mad7 plasmid pMLBA638. Transformants were picked using a Q-pix Colony Picking System (Molecular Devices) to inoculate 1 well of 96-well plate containing YPD+clonNAT media. The plates were grown for 2 days then glycerol was added to 20% final concentration and the plates were stored at −80° C. until needed. Integration of the specific glucose transporter construct was verified by PCR with locus specific primers and subsequent sequencing of the PCR product. Sequence verified isolates were hit-picked to a new plate and glycerol stocks prepared as above. The strains generated from this method are shown in Table 13.

TABLE 13

| | | | | | | SEQ | |
|---|---|---|---|---|---|---|---|
| | fragment 1 | fragment 2 | fragment 3 | fragment 4 | donor organism | ID No. | strain name |
| 1 | HP34 | pTEF2_B9H5Q5 | 3p_B9H5Q5 | TH13 | Populus | 364 | B9H5Q5 |
| | | | | | trichocarpa | | |
| 2 | HP34 | pTEF2_P13866 | 3p_P13866 | TH13 | Homo sapiens | 363 | P13866 |
| 3 | HP34 | pTEF2_A0A1I0B6B1 | 3p_A0A1I0B6B1 | TH13 | Methanococcoides | 362 | A0A1I0B6B1 |
| | | | | | vulcani | | |
| 4 | HP34 | pTEF2_BAT10300 | 3p_BAT10300 | TH13 | Cucumis sativus | 361 | BAT10300 |
| 5 | HP34 | pTEF2_Q9SFG0 | 3p_Q9SFG0 | TH13 | Arabidopsis | 360 | Q9SFG0 |
| | | | | | thaliana | | |
| 6 | HP34 | pTEF2_AWV91652 | 3p_AWV91652 | TH13 | Glycine max | 359 | AWV91652 |
| 7 | HP34 | pTEF2_BFB33985 | 3p_BFB33985 | TH13 | Homo sapiens | 358 | BFB33985 |
| 8 | HP34 | pTEF2_AWL17596 | 3p_AWL17596 | TH13 | Brassica napus | 357 | AWL17596 |
| 9 | HP34 | pTEF2_SA9RGL7 | 3p_SA9RGL7 | TH13 | Physcomitrella | 356 | A9RGL7 |
| | | | | | patens | | |
| 10 | HP34 | pTEF2_A0A1P8AWV3 | 3p_A0A1P8AWV3 | TH13 | Arabidopsis | 355 | A0A1P8AWV3 |
| | | | | | thaliana | | |
| 11 | HP34 | pTEF2_A0A178VHL3 | 3p_A0A178VHL3 | TH13 | Arabidopsis | 354 | A0A178VHL3 |
| | | | | | thaliana | | |

### Example 7: Impact of Expressing of Glucose Transporters in Yeast on Ethanol Fermentation Using Corn Mash Produced Industrially by a Liquefaction Blend

[0971] THIS example describes the evaluation of yeast strains expressing genes encoding transporters involved in glucose uptake. Particularly, the impact on final ethanol titer and generation of fermentation by-products during ethanol fermentation with an industrially prepared corn mash is compared among the yeast strains listed in Table 14.

TABLE 14
Strains used in fermentation

Meji797 (control)
B9H5Q5
A0A110B6B1
P13866
BAT10300
Q9SFG0
AWV91652
BFB33985
AWL17596
A9RGL7
A0A1P8AWV3
A0A178VHL3

### Seed Culture:

[0972] Cryo-preserved cultures of strains were first grown in liquid YPD media (Yeast extract, 10 g. Peptone, 20 g. Dextrose, 60 g. dissolve in 1 L of distilled water). Cultivation was done aseptically in a sterile 125-ml Erlenmeyer flask filled with 50 ml YPD media and inoculated with 100 μl of cryo-preserved culture. Flasks were incubated in a shaking incubator at 32° C. for 16 h with shaking at 150 rpm. The YPD grown seed cultures (40 ml) were centrifuged at 3,500 rpm for 10 min at 22° C., and the resulting cell pellet was washed and resuspended in tap water. The resuspended cells were used to inoculate the corn mash at the beginning of simultaneous saccharification and fermentation (SSF).

### Corn Mash:

[0973] Industrially prepared corn mash liquefied with a commercially available enzyme (Liquozyme Pro) from Novozymes A/S containing an alpha-amylase and a protease was obtained from an ethanol plant. The mash contained 32.2% dried solids as measured by Mettler-Toledo HB43-S moisture balance. The mash was supplemented with 500 ppm of urea and 2 ppm of antibiotic LACTROL™ and its pH was adjusted to 5.0 prior to use in SSF.

### Simultaneous Saccharification and Fermentation (SSF)

[0974] All fermentations were carried out in 2-ml plastic test tubes with caps having a 0.5 mm hole. Tubes were filled with 4-5 g corn mash and inoculated with resuspended seed culture at 10 million cells per gram of mash. A commercially available glucoamylase enzyme blend (Innova® Ultra L) was added to flasks at 0.0368% (w/w) of dry corn solids. Fermentation was run for 54-65 h. Samples were taken at the end of fermentation to analyze ethanol and fermentation by-products in the fermented corn mash.

Ethanol and Fermentation by-Products Analysis

[0975] At the end of fermentation 50 μL of 40% v/v H₂SO₄ was added to fermentation tubes. Tubes were then vortexed and centrifuged at 3,500 rpm for 10 min at 22° C. The resulting supernatant was filtered through a 0.2 μm syringe filter. Filtered samples were stored at 4° C. prior to and during HPLC analysis. Analysis of ethanol and other fermentation by-products was conducted using an HPLC (Agilent 1100/1200 series) machine equipped with a guard column (Bio-Rad, Micro-Guard Cation H+ Cartridge, 30×4.6 mm) and an analytical column (Bio-Rad, Aminex HPX-87H, 300×7.8 mm) using 5 mM Sulfuric Acid as a mobile phase with a flow rate of 0.8 mL/min. Column temperature was maintained at 65° C., and metabolites were detected using a Refractive Index detector at 55° C.

### Results

[0976] Expression of glucose transporters can affect the fermentation performance of yeast strains compared to control (the host strain not expressing any glucose transporter). FIG. 19 shows the final ethanol titers of corn mash fermentation by the yeast strains expressing different glucose transporters in comparison to the control as listed in Table 14. Yeast strains P13866, B9H5Q5, A0A1I0B6B1 and BAT10300 produce more ethanol than does control. On the other hand, yeast strains Q9SFG0, AWV91652, BFB33985, AWL17596, A9RGL7, A0A1P8AWV3, and A0A178VHL3 generate less ethanol compared to control. As shown in FIG. 20, expression of glucose transporters by strains impacts formation of glycerol, a fermentation by-product that affects ethanol yield, in comparison to the control. Glucose transporter-expressing strains with higher ethanol than control (P13866, B9H5Q5, A0A1I0B6B1 and BAT10300) produce less glycerol compared to the control. Furthermore, formation of succinic acid, another fermentation by-product, is also influenced by the expression of glucose transporters in yeast. All strains expressing a glucose transporter exhibit lower concentration of succinic acid at the end of fermentation than does the control (FIG. 21). Additionally, glucose transporter-expressing strains exhibit a different fingerprint of acetic acid at the end of fermentation compared to control (FIG. 22). Strains A9RGL7, A0A1P8AWV3, AWV91652 and Q9SFG0 produce more acetic acid than control, and strains B9H5Q5, BAT10300, A0A1I1B6B1, A0A178VHL3, BFB33985 and P13866 generate less acetic acid compared to control.

### Example 8: Impact of Expressing of Glucose Transporters in Yeast on Ethanol Fermentation Using Corn Mash Produced Industrially by a Liquefaction Blend

[0977] This example describes the evaluation of yeast strains expressing genes encoding transporters involved in glucose uptake. Particularly, the impact on final ethanol titer and generation of fermentation by-products during ethanol fermentation with an industrially prepared corn mash is compared among the yeast strains listed in Table 15.

TABLE 15
Strains used in fermentation

Meji797 (control)
P13866
BAT10300
B9H5Q5
A0A1I0B6B1
A0A178VHL3
AWV91652

### Seed Culture:

[0978] Cryo-preserved cultures of strains were first grown in liquid YPD media (Yeast extract, 10 g. Peptone, 20 g. Dextrose, 60 g. dissolve in 1 L of distilled water). Cultivation was done aseptically in a sterile 125-ml Erlenmeyer flask filled with 50 ml YPD media and inoculated with 100 μl of cryo-preserved culture. Flasks were incubated in a shaking incubator at 32° C. for 16 h with shaking at 150 rpm. The YPD grown seed cultures (40 ml) were centrifuged at 3,500 rpm for 10 min at 22° C., and the resulting cell pellet was washed and resuspended in tap water. The resuspended cells were used to inoculate the corn mash at the beginning of simultaneous saccharification and fermentation (SSF).

### Corn Mash:

[0979] Industrially prepared corn mash liquefied with a commercially available enzyme (Liquozyme Pro) from Novozymes A/S containing an alpha-amylase and a protease was obtained from an ethanol plant. The mash contained 32% dried solids as measured by Mettler-Toledo HB43-S moisture balance. The mash was supplemented with 500 ppm of urea and 2 ppm of antibiotic LACTROL™ and its pH was adjusted to 5.0 prior to use in SSF.

### Simultaneous Saccharification and Fermentation (SSF)

[0980] Fermentations were carried out in 125-ml baffled flasks with screw caps having a 0.5 mm hole. Flasks were filled with 40-50 g corn mash and inoculated with resuspended seed culture at 10 million cells per gram of mash. A commercially available glucoamylase enzyme blend (Innova® Ultra L) was added to flasks at 0.0368% (w/w) of dry corn solids. Fermentation was run for 54-65 h. Samples were taken at the end of fermentation to analyze ethanol and fermentation by-products in the fermented corn mash.

Ethanol and Fermentation by-Products Analysis

[0981] Samples (5 g) removed from flasks at the end of fermentation were transferred into 15 ml conical tubes containing 50 μL of 40% v/v H₂SO₄, vortexed, and centrifuged at 3,500 rpm for 10 min at 22° C. The resulting supernatant was filtered through a 0.2 μm syringe filter. Filtered samples were stored at 4° C. prior to and during HPLC analysis. Analysis of ethanol and other fermentation by-products was conducted using an HPLC (Agilent 1100/1200 series) machine equipped with a guard column (Bio-Rad, Micro-Guard Cation H+ Cartridge, 30×4.6 mm) and an analytical column (Bio-Rad, Aminex HPX-87H, 300×7.8 mm) using 5 mM Sulfuric Acid as a mobile phase with a flow rate of 0.8 mL/min. Column temperature was maintained at 65° C., and metabolites were detected using a Refractive Index detector at 55° C.

### Results

[0982] The resulting final concentration for ethanol, glycerol, succinic acid, and acetic acid for the strains of Table 15 are shown in FIGS. 23-26, respectively.

### Example 9: Construction of Yeast Strains Expressing a Heterologous Glycerol Transporter Under Control of the Yeast TEF2 Promoter

[0983] This example describes the construction of yeast cells expressing a heterologous glycerol transporter under control of an S. cerevisiae TEF2 promoter. Homologous recombination was used on strain YS114-G11 to target a single PCR amplicon that contains the promoter, gene, and terminator to the X-3 locus of the recipient strain (see Mikkelsen et al. Metabolic Engineering v14 (2012) pp 104-111). The resulting strain has the TEF2 promoter (SEQ ID NO: 2), a heterologous polynucleotide encoding the glycerol transporter BGE51665 (SEQ ID NO: 323), and the TEF1 terminator (SEQ ID NO: 233) integrated into the S. cerevisiae genome at the X-3 locus.

### Construction of the Expression Cassette Containing Fragment (Fragment 5)

[0984] To generate linear DNA for transformation into yeast, genomic DNA from an S. cerevisiae strain containing the BGE51665 transporter integrated at X-3 was used as the template along with primers 1230181+1230245 that anneal to the 5′ of and 3′ of the X-3 locus containing the BGE51665 expression cassette. Following thermocycling, the PCR reaction products were cleaned using the NucleoSpin Gel and PCR clean-up kit (Macherey-Nagel). The resulting linear DNA was designated fragment 5.

(SEQ ID NO: 392 ADD)
Primer 1230181 = 5′-AACGA CAGCA CAAAG GAACT TTCAC-
3′
(SEQ ID NO: 393 ADD)
Primer 1230245 = 5′-TTTAA AACAC CAAGA ACTTA GTTTC
GAATA AACAC AC-3′

Integration of Fragment 5 to Generate Yeast Strains with a Heterologous Glycerol Transporter Under Control of the TEF2 Promoter

[0985] The yeast strain YS114-G11 was transformed with 150 ng of DNA fragment 5. To aid homologous recombination of the linear fragment 5 at the X-3 site, a plasmid containing Mad7 and guide RNA specific to X-3 (pMLBA647; FIG. 27) was also used in the transformation. Fragment 5 was transformed into the into S. cerevisiae strain YS114-G11 following a yeast electroporation protocol (Thompson et al. Yeast. 1998 Apr. 30; 14(6):565-71). Transformants were selected on YPD+clonNAT to select for transformants that contain the CRISPR/Mad7 plasmid pMLBA647. Transformants were picked using a Q-pix Colony Picking System (Molecular Devices) to inoculate a well of 96-well plate containing YPD media. The plates were grown for 2 days then glycerol was added to 20% final concentration and the plates were stored at −80° C. until needed. Integration of the BGE51665 glycerol transporter construct was verified by PCR with locus specific primers and subsequent sequencing of the PCR product. Sequence-verified isolates designated strain YS155-G4 were hit-picked to a new plate and glycerol stocks prepared as described above.

### Example 10: Construction of Yeast Strains Expressing a Heterologous Glycerol Transporter and a Non-Phosphorylating NADP-Dependent Glyceraldehyde-3-Phosphate Dehydrogenase (gapN)

[0986] This example describes the construction of yeast cells expressing a heterologous glycerol transporter under control of an S. cerevisiae TEF2 promoter and expressing a heterologous gapN under control of an S. cerevisiae HOR7 promoter. Homologous recombination was used with strain YS114-G11 to simultaneously target a PCR amplicon that contains the promoter, glycerol transporter gene, and terminator to the X-3 locus of the recipient strain and to target a PCR amplicon that contains the promoter, gapN gene, and terminator to the X-2 locus of the recipient strain (see Mikkelsen et al. Metabolic Engineering v14 (2012) pp 104-111). The resulting strains have the TEF2 promoter (SEQ ID NO: 2), a heterologous polynucleotide encoding the glycerol transporter BGE51665 (SEQ ID NO: 323), and the TEF1 terminator (SEQ ID NO: 233) integrated into the S. cerevisiae genome at the X-3 locus and have the HOR7 promoter (SEQ ID NO: 261), a heterologous polynucleotide encoding a gapN, and the TEF1 terminator (SEQ ID NO: 233) integrated into the S. cerevisiae genome at the X-2 locus.

### Construction of the Expression Cassette Containing Fragments

[0987] To generate linear DNA containing the gapN expression cassettes of interest for transformation into yeast, genomic DNA from an S. cerevisiae strain containing the gapN gene integrated at X-2 was used as the template along with primers 1230184+1230742 that anneal to the 5′ of and 3′ of the X-2 locus containing the gapN expression cassette of interest. Following thermocycling, the PCR reaction products were cleaned using the NucleoSpin Gel and PCR clean-up kit (Macherey-Nagel). The resulting linear DNAs were designated as fragment 6.

(SEQ ID NO: 394 ADD)
Primer 1230184 = 5′-AAAAA GCTCG AAATG AATGG ATATA
TTCTT TTTG-3′
(SEQ ID NO: 395 ADD)
Primer 1230742 = 5′-GAAAA AAAAA AAAAG GAAAA AACGC
GTAAA TGAAA AGTTC-3′

Integration of Fragment 5 and Fragment 6 to Generate Yeast Strains with a Heterologous Glycerol Transporter and a Heterologous gapN

[0988] The yeast strain YS114-G11 was transformed with DNA fragments 5 and 6 as described above. Each transformation contained a linear DNA fragment 5 and a linear DNA fragment 6. Equimolar amounts of the two linear DNAs were included for each transformation with 150 ng of the largest DNA. To aid homologous recombination of the linear fragment 5 at the X-3 site and of the linear fragment 6 at the X-2 site, a plasmid containing Mad7 and two guide RNAs, one specific to X-3 and the other to X-2 (pMLBA775; FIG. 28) was also used in the transformation. Fragment 5 and fragment 6 were transformed into the into S. cerevisiae strain YS114-G11 following a yeast electroporation protocol (Thompson et al. Yeast. 1998 Apr. 30; 14(6):565-71). Transformants were selected on YPD+clonNAT to select for transformants that contain the CRISPR/Mad7 plasmid pMLBA647. Transformants were picked using a Q-pix Colony Picking System (Molecular Devices) to inoculate a well of 96-well plate containing YPD media. The plates were grown for 2 days then glycerol was added to 20% final concentration and the plates were stored at −80° C. until needed. Integration of polynucleotides encoding the BGE51665 glycerol transporter at X-3 and of polynucleotides encoding the desired gapN at X-2 was verified by PCR with locus specific primers and subsequent sequencing of the PCR products. Sequence verified isolates were hit-picked to a new plate and glycerol stocks prepared as above. The strains generated from this method are shown in Table 16.

TABLE 16

| | | | SEQ |
|---|---|---|---|
| strain name | gapN donor organism | Sequence Code | ID NO |
| YS155-A7 | Streptococcus mutans | Q59931 | 279 |
| YS155-G7 | Cicer arietinum | A0A1S2YP36 | 265 |
| YS155-F9 | Streptococcus hyointestinalis | A0A380K8A8 | 273 |
| YS155-G9 | Streptococcus sp. | A0A139NKR4 | 269 |
| YS155-H10 | Streptococcus equinus | Q3C1A6 | 267 |

### Example 11: Fermentation Performance of Yeast Strains Expressing a Heterologous Glycerol Transporter and Non-Phosphorylating NADP-Dependent Glyceraldehyde-3-Phosphate Dehydrogenase (gapN)

[0989] This example describes the performance of yeast strains from example 10 in corn mash fermentations. Particularly, the effect of yeast expressing glycerol transporter and gapN on final ethanol titer in a corn mash fermentation is described.

### Preparation of Yeast Culture for Tube Fermentations

[0990] Control yeast strains YS114-G11 and YS155-G4 (supra) and yeast strains from Example 10 were incubated overnight in YPD media (6% w/v D-glucose, 2% peptone, 1% yeast extract) at 32° C., 150 rpm, and 32° C. After 18 hours, the cultures were centrifuged at 3500 rpm for 5 minutes and the supernatant was discarded. Cells were suspended in 10 mL tap water and total yeast concentration was determined using a YC-100 Nucleocounter. Industrially obtained liquefied corn mash, where liquefaction was carried out using Fortiva Revo HPI, was supplemented with 3 ppm lactrol and 600 ppm of urea. Simultaneous saccharification and fermentation (SSF) was performed via mini-scale fermentations. Approximately 5 g of liquefied corn mash was added to 12 mL tubes. Tubes were dosed with yeast at a concentration of 10\hat{ }6 yeast cells/g of corn mash. Tubes were subsequently dosed with 0.36 AGU/g of dry solids of an exogenous glucoamylase enzyme product (Innova Achieve F; Novozymes A/S). Glucoamylase and yeast dosages were administered based on the exact weight of corn slurry in each tube. Tubes were incubated at 32° C. and pH 5.0. Triplicates of each strain were analyzed after 65 hour fermentations. Fermentations were stopped by addition of 50 uL of 40% H₂SO₄, followed by centrifuging, and filtration through a 0.2 micron filter. Ethanol and glycerol concentrations were determined using HPLC. Reaction conditions are summarized in Table 17.

### Results

[0991] FIGS. 29 and 30 show the resulting ethanol and glycerol, respectively, of the strains expressing a glycerol transporter and GAPN. Strain YS155-G4, which expresses the glycerol transporter alone, produces similar ethanol and 16% less glycerol than the control strain, YS114-G11. Strains expressing a combination of glycerol transporter and GAPN produced around 2% more ethanol and around 30% lower glycerol overall compared to control strains.

1: A recombinant yeast cell comprising:
a heterologous polynucleotide encoding a glycerol transporter, and
a heterologous polynucleotide encoding a non-phosphorylating NADP-dependent glyceraldehyde-3-phosphate dehydrogenase (GAPN),
wherein the cell is capable of reduced glycerol production compared to the same cell without the heterologous polynucleotide encoding the non-phosphorylating NADP-dependent glyceraldehyde-3-phosphate dehydrogenase (GAPN) when fermented under the same conditions.

2: The recombinant host cell of claim 1, wherein the cell is capable of reduced glycerol production compared to the same cell without the heterologous polynucleotide encoding the glycerol transporter when fermented under the same conditions.

3: The recombinant host cell of claim 1, wherein the heterologous polynucleotide encoding the non-phosphorylating NADP-dependent glyceraldehyde-3-phosphate dehydrogenase (GAPN) is operably linked to a promoter that is foreign to the polynucleotide.

4: The recombinant host cell of claim 1, wherein the non-phosphorylating NADP-dependent glyceraldehyde-3-phosphate dehydrogenase (GAPN) has a mature polypeptide sequence with at least 80% sequence identity to any one of SEQ ID NOs: 262-280 and 365-391.

5. (canceled)

6: The recombinant host cell of claim 1, wherein the non-phosphorylating NADP-dependent glyceraldehyde-3-phosphate dehydrogenase (GAPN) has a mature polypeptide sequence comprising or consisting of the amino acid sequence of any one SEQ ID NOs: 262-280 and 365-391.

7. The recombinant host cell of any one of claims 1-6, wherein the heterologous polynucleotide encoding the glycerol transporter is operably linked to a promoter that is foreign to the polynucleotide.

8: The recombinant host cell of claim 1, wherein the glycerol transporter has a mature polypeptide sequence with at least 80% sequence identity to any one of SEQ ID NOs: 312-323.

9. (canceled)

10: The recombinant host cell of claim 1, wherein the glycerol transporter has a mature polypeptide sequence comprising or consisting of the amino acid sequence of any one of SEQ ID NOs: 312-323.

11: The recombinant host cell of claim 1, wherein the cell comprises an active pentose fermentation pathway.

12: The recombinant host cell of claim 1, wherein the cell further comprises a heterologous polynucleotide encoding a glucoamylase.

13: The recombinant host cell of claim 1, wherein the cell further comprises a heterologous polynucleotide encoding an alpha-amylase.

14: The recombinant host cell of claim 1, wherein the cell further comprises a disruption to an endogenous gene encoding a glycerol 3-phosphate dehydrogenase (GPD) and/or a disruption to an endogenous gene encoding a glycerol 3-phosphatase (GPP).

15: The recombinant host cell of claim 1, wherein the cell is capable of higher ethanol production compared to the same cell without the heterologous polynucleotide encoding the glycerol transporter under the same conditions.

16: The recombinant host cell of claim 1, wherein the cell is capable of higher ethanol production compared to the same cell without the heterologous polynucleotide encoding the non-phosphorylating NADP-dependent glyceraldehyde-3-phosphate dehydrogenase (GAPN) when fermented under the same conditions.

17. (canceled)

18: The recombinant host cell of claim 1, wherein the cell is a Saccharomyces cerevisiae cell.

19: A composition comprising the recombinant host cell of claim 1 and one or more naturally occurring and/or non-naturally occurring components, such as components are selected from the group consisting of: surfactants, emulsifiers, gums, swelling agents, and antioxidants.

20-21. (canceled)

22: A method of producing a fermentation product from a starch-containing or cellulosic-containing material, the method comprising:
(a) saccharifying the starch-containing or cellulosic-containing material; and
(b) fermenting the saccharified material of step (a) with the recombinant host cell of claim 1 under suitable conditions to produce the fermentation product.

23: The method of claim 22, wherein saccharification of step (a) occurs on a starch-containing material, and wherein the method comprises liquefying the starch-containing material by contacting the material with an alpha-amylase prior to saccharification.

24. (canceled)

25: The method of claim 22, wherein fermentation and saccharification are performed simultaneously in a simultaneous saccharification and fermentation (SSF).

26: The method of claim 22, wherein the fermentation product is ethanol.

27-29. (canceled)

The application's sequence listing, which the Patent Office published only in electronic form, follows.

SEQUENCE LISTING (395 sequences)

SEQ ID NO: 1 - DNA, 621 bp, Saccharomyces cerevisiae
cagttcgagtttatcattatcaatactgccatttcaaagaatacgtaaataattaatagtagtgattttcctaactttatttagtcaaaaaattagccttttaattctgctgtaacccgtacatgcccaaaatagggggcgggttacacagaatatataacatcgtaggtgtctgggtgaacagtttattcctggcatccactaaatataatggagcccgctttttaagctggcatccagaaaaaaaaagaatcccagcaccaaaatattgttttcttcaccaaccatcagttcataggtccattctcttagcgcaactacagagaacaggggcacaaacaggcaaaaaacgggcacaacctcaatggagtgatgcaacctgcctggagtaaatgatgacacaaggcaattgacccacgcatgtatctatctcattttcttacaccttctattaccttctgctctctctgatttggaaaaagctgaaaaaaaaggttgaaaccagttccctgaaattattcccctacttgactaataagtatataaagacggtaggtattgattgtaattctgtaaatctatttcttaaacttcttaaattctacttttatagttagtctt

SEQ ID NO: 2 - DNA, 644 bp, Saccharomyces cerevisiae
agctacctatattccaccataatatcaatcatgcggttgctggtgtatttaccaataatgtttaatgtatatatattaggggccgtatacttacatatagtagatgtcaagcgtaggcgcttcccctgccggctgtgacggcgccataaccaaggtatctatagaccgccaatcagcaaactacctccgtacattcatgttgcacccacacatgtacacacccagaccgcaacaaattacccataaggttgtttgtgacggcgtcgtacaagagaacgtgggaactttttaggctcaccaaaaaagaaaggaaaaatacgagttgctgacagaagcctcaagaaaaaaaaaattcttcttcgactatgctggaggcagagatgatcgagccggtagttaactatatatagctaaattggttccatcaccttcttttctggtgtcgctccttctagtgctatttctggcttttcctattttttttttttccatttttctttctctctttctaatatataaattctcttgcattttctatttttctctctatctattctacttgtttattcccttcaaggtttttttttaaggagtacttgtttttagaatatacggtcaacgaactataattaagctagaacaaa

SEQ ID NO: 3 - DNA, 457 bp, Saccharomyces cerevisiae
ctccagaaaggcaacgcaaaattttttttccagggaataaactttctatgacccactacttctcgtaggaacaatttcgggcccctgcgtgttcttctgaggttcatcttttacatttgcttctgctggataattttcagaggcaacaaggaaaaattagatggcaaaaagtcgtctttcaaggaaaaatccccaccatccttcgagatcccctgtaacttattggcaactgaaagaatgaaaaggaggaaaatacaaaatatactagaactgaaaaaaaaaagtataaatagagacgatatatgccaatacttcacaatgttcgaatccattcttcatttgcagctattgtaaaataataaaacatcaagaacaaacaagctcaacttgtcttttctaagaacaaagaataaacacaaaaacaaaaagtttttttaattttaatcgctagaacaaa

SEQ ID NO: 4 - DNA, 700 bp, Saccharomyces cerevisiae
gtgagtaaggaaagagtgaggaactatcgcatacctgcatttaaagatgccgatttgggcgcgaatcctttattttggcttcaccctcatactattatcagggccagaaaaaggaagtgtttccctccttcttgaattgatgttaccctcataaagcacgtggcctcttatcgagaaagaaattaccgtcgctcgtgatttgtttgcaaaaagaacaaaactgaaaaaacccagacacgctcgacttcctgtcatcctattgattgcagcttccaatttcgtcacacaacaaggtcctagcgacggctcacaggttttgtaacaagcaatcgaaggttctggaatggcgggaaagggtttagtaccacatgctatgatgcccactgtgatctccagagcaaagttcgttcgatcgtactgttactctctctctttcaaacagaattgtccgaatcgtgtgacaacaacagcctgttctcacacactcttttcttctaaccaagggggtggtttagtttagtagaacctcgtgaaacttacatttacatatatataaacttgcataaattggtcaatgcaagaaatacatatttggtcttttctaattcgtagtttttcaagttcttagatgctttctttttctcttttttacagatcatcaaggaagtaattatctactttttacaacaaatataaaaca

SEQ ID NO: 5 - DNA, 705 bp, Sacharromyces cerevisiae
atccttttgttgtttccgggtgtacaatatggacttcctcttttctggcaaccaaacccatacatcgggattcctataataccttcgttggtctccctaacatgtaggtggcggaggggagatatacaatagaacagataccagacaagacataatgggctaaacaagactacaccaattacactgcctcattgatggtggtacataacgaactaatactgtagccctagacttgatagccatcatcatatcgaagtttcactaccctttttccatttgccatctattgaagtaataataggcgcatgcaacttcttttctttttttttcttttctctctcccccgttgttgtctcaccatatccgcaatgacaaaaaaatgatggaagacactaaaggaaaaaattaacgacaaagacagcaccaacagatgtcgttgttccagagctgatgaggggtatctcgaagcacacgaaactttttccttccttcattcacgcacactactctctaatgagcaacggtatacggccttccttccagttacttgaatttgaaataaaaaaaagtttgctgtcttgctatcaagtataaatagacctgcaattattaatcttttgtttcctcgtcattgttctcgttccctttcttccttgtttctttttctgcacaatatttcaagctataccaagcatacaatcaact

SEQ ID NO: 6 - DNA, 700 bp, Saccharomyces cerevisiae
aagaggatgtccaatattttttttaaggaataaggatacttcaagactagattcccccctgcattcccatcagaaccgtaaaccttggcgctttccttgggaagtattcaagaagtgccttgtccggtttctgtggctcacaaaccagcgcgcccgatatggctttcttttcacttatgaatgtaccagtacgggacaattagaacgctcctgtaacaatctctttgcaaatgtggggttacattctaaccatgtcacactgctgacgaaattcaaagtaaaaaaaaatgggaccacgtcttgagaacgatagattttctttattttacattgaacagtcgttgtctcagcgcgctttatgttttcattcatacttcatattataaaataacaaaagaagaatttcatattcacgcccaagaaatcaggctgctttccaaatgcaattgacacttcattagccatcacacaaaactctttcttgctggagcttcttttaaaaaagacctcagtacaccaaacacgttacccgacctcgttattttacgacaactatgataaaattctgaagaaaaaataaaaaaattttcatacttcttgcttttatttaaaccattgaatgatttcttttgaacaaaactacctgtttcaccaaaggaaatagaaagaaaaaatcaattagaagaaaacaaaaaacaaa

SEQ ID NO: 7 - protein, 19 aa, Saccharomyces cerevisiae
MRFPSIFTTVLFAASSALA

SEQ ID NO: 8 - protein, 556 aa, Gloeophyllum sepiarium
QSVDSYVSSEGPIAKAGVLANIGPNGSKASGASAGVVVASPSTSDPDYWYTWTRDSSLVFKSLIDQYTTGIDGTSSLRTLIDDFVTAEANLQQVSNPSGTLTTGGLGEPKFNVDETAFTGAWGRPQRDGPALRSTALITYGNWLLSNGNTSYVTSNLWPIIQNDLGYVVSYWNQSTYDLWEEVDSSSFFTTAVQHRALREGAAFATAIGQTSQVSSYTTQADNLLCFLQSYWNPSGGYITANTGGGRSGKDANTLLASIHTYDPSAGCDAATFQPCSDKALSNLKVYVDSFRSVYSINSGIASNAAVATGRYPEDSYQGGNPWYLTTFAVAEQLYDALNVWESQGSLEVTSTSLAFFQQFSSGVTAGTYSSSSSTYSTLTSAIKSFADGFVAVNAKYTPSNGGLAEQYSKSDGSPLSAVDLTWSYASALTAFEARNNTQFAGWGAAGLTVPSSCSGNSGGPTVAVTFNVNAETVWGENIYLTGSVDALENWSADNALLLSSANYPTWSITVNLPASTAIEYKYIRKNNGAVTWESDPNNSITTPASGSTTENDTWR

SEQ ID NO: 9 - protein, 374 aa, Aspergillus niger
APAPTRKGFTINQIARPANKTRTINLPGMYARSLAKFGGTVPQSVKEAASKGSAVTTPQNNDEEYLTPVTVGKSTLHLDFDTGSADLWVFSDELPSSEQTGHDLYTPSSSATKLSGYTWDISYGDGSSASGDVYRDTVTVGGVTTNKQAVEAASKISSEFVQNTANDGLLGLAFSSINTVQPKAQTTFFDTVKSQLDSPLFAVQLKHDAPGVYDFGYIDDSKYTGSITYTDADSSQGYWGFSTDGYSIGDGSSSSSGFSAIADTGTTLILLDDEIVSAYYEQVSGAQESEEAGGYVFSCSTNPPDFTVVIGDYKAVVPGKYINYAPISTGSSTCFGGIQSNSGLGLSILGDVFLKSQYVVFNSEGPKLGFAAQA

SEQ ID NO: 10 - protein, 590 aa, Trichoderma reesei
SVHLLESLEKLPHGWKAAETPSPSSQIVLQVALTQQNIDQLESRLAAVSTPTSSTYGKYLDVDEINSIFAPSDASSSAVESWLQSHGVTSYTKQGSSIWFQTNISTANAMLSTNFHTYSDLTGAKKVRTLKYSIPESLIGHVDLISPTTYFGTTKAMRKLKSSGVSPAADALAARQEPSSCKGTLVFEGETFNVFQPDCLRTEYSVDGYTPSVKSGSRIGFGSFLNESASFADQALFEKHFNIPSQNFSVVLINGGTDLPQPPSDANDGEANLDAQTILTIAHPLPITEFITAGSPPYFPDPVEPAGTPNENEPYLQYYEFLLSKSNAEIPQVITNSYGDEEQTVPRSYAVRVCNLIGLLGLRGISVLHSSGDEGVGASCVATNSTTPQFNPIFPATCPYVTSVGGTVSFNPEVAWAGSSGGFSYYFSRPWYQQEAVGTYLEKYVSAETKKYYGPYVDFSGRGFPDVAAHSVSPDYPVFQGGELTPSGGTSAASPVVAAIVALLNDARLREGKPTLGFLNPLIYLHASKGFTDITSGQSEGCNGNNTQTGSPLPGAGFIAGAHWNATKGWDPTTGFGVPNLKKLLALVRF

SEQ ID NO: 11 - protein, 511 aa, Thermoascus aurantiacus
VPVEVAGSAQGLDVTLSQVGNTRIKAVVKNTGSEDVTFVHLNFFKDAAPVQKVSLFRNATEVQFQGIKQRLITEGLSDDALTTLAPGATIEDEFDIASTSDLSEGGTITINSNGLVPITTDNKVTGYIPFTSNELSIDVDAAEAASVTQAVKILERRTRISSCSGSRQSALTTALRNAASLANKAADAAQSGSASKFSEYFKTTSSSTRQTVAARLRAVAREASSSSSGATTYYCLDPFGYCSGNVLAYTLPSYNIIANCPIFYTYLPPLTSTCHAQDQATTVLHEFTHAPGVYSPGTLDLAYGYQAAMGLSSSQAVMNADTYALYANAIYLGCTRISSCSGSRQSALTTALRNAASLANAAADAAQSGSASKFSEYFKTTSSSTRQTVAARLRAVAREASSSSSGATTYYCDDPYGYCSSNVLAYTLPSYNIIANCDIFYTYLPALTSTCHAQDQATTALHEFTHAPGVYSPGTDDLAYGYQAAMGLSSSQAVMNADTYALYANAIYLGC

SEQ ID NO: 12 - protein, 550 aa, Dichomitus squalens
KPTARNLKLHESRPSAPNGFSLVGSADSNRTLKLRLALAESNFSELERKLYDVSTPKSANYGKHLSKAEVQQLVAPGQDSIDAVNAWLKENDITAKTISSTGEWISFEVPVSKANDLFDADFSVFKHDDTGVEAIRTLSYSIPAELQGHLDLVHPTVTFPNPYSHLPVFQSPVKKTAEIQNFTAGAIPSSCSSTITPACLQAIYNIPTTAATESSNQLGVTGFIDQYANKKDLKTFLKKYRTDISSSTTFTLQTLDGGSNSQTGSKAGVEANLDIQYTVGVATGVPTTFISVGDDFQDGDLEGFLDVINALLDEDAPPSVLTTSYGQDESTISRALAVKLCNAYAQLGARGVSILFASGDGGVSGSQSASCSKFVPTFPSGCPYMTSVGATQGVNPETAADFSSGGFSNYWGVPDYQSDAVSTYLSALGKTNSGKYNASGRGFPDVSTQGVSFEVVVDGSVEAVDGTSCASPTFASIISLVNDKLVAAGKSPLGFLNPFLYSDGVAALNDITSGSNPGCNTNGFPAKKGWDPVTGLGTPDFKKLLTAVGL

SEQ ID NO: 13 - protein, 353 aa, Nocardiopsis prasina
ATGALPQSPTPEADAVSMQEALQRDLDLTSAEAEELLAAQDTAFEVDEAAAEAAGDAYGGSVFDTESLELTVLVTDAAAVEAVEATGAGTELVSYGIDGLDEIVQELNAADAVPGVVGWYPDVAGDTVVLEVLEGSGADVSGLLADAGVDASAVEVTTSDQPELYADIIGGLAYTMGGRCSVGFAATNAAGQPGFVTAGHCGRVGTQVTIGNGRGVFEQSVFPGNDAAFVRGTSNFTLTNLVSRYNTGGYATVAGHNQAPIGSSVCRSGSTTGWHCGTIQARGQSVSYPEGTVTNMTRTTVCAEPGDSGGSYISGTQAQGVTSGGSGNCRTGGTTFYQEVTPMVNSWGVRLRT

SEQ ID NO: 14 - protein, 456 aa, Penicillium simplicissimum
APASTAKDSVSSVVKNGVKYTVFEHAATGAKMEFVKNSGICETTPGVNQYSGYLSVGSNMNMWFWFFEARNNPQQAPLAAWFNGGPGCSSMIGLFQENGPCHFVNGDSTPSLNEYSWNNYANMLYVDQPIGVGFSYGTDDVTSTVTAAPYVWKLLQAFYAQFPEYESRDFAIFTESYGGHYGPEFASYIQEQNSAIKTGSISGENINLVALGVNNGWIDSTIQEKAYIDFSYNNSYQQLIDDSQRTSLLSAYNSQCLPAIQKCTKSGSNSDCQNADSVCYNKIEGPISSSGDWDVYDIREPSNDPYPPSTYSTYLSNADVVKAIGAQSSYQECPNGPYNKFASTGDNPRSFLSTLSSVVKSGINVLVWAGDADWICNWLGNYEVANAVDFSGHTEFSAKDLAPYTVNGTEKGMFKNVANFSFLKVYGAGHEVPYYQPDTALQVFEQVLQNKPIFST

SEQ ID NO: 15 - protein, 502 aa, Aspergillus niger
LQNPHRRAVPPPLSHRSVASRSVPVERRTTDFEYLTNKTARFLVNGTSIPEVDFDVGESYAGLLPNTPTGNSSLFFWFFPSQNPEASDEITIWLNGGPGCSSLDGLLQENGPFLWQPGTYKPVPNPYSWTNLTNVVYIDQPAGTGFSPGPSTVNNEEDVAAQFNSWFKHFVDTFDLHGRKVYITGESYAGMYVPYIADAMLNEEDTTYFNLKGIQINDPSINSDSVMMYSPAVRHLNHYNNIFQLNSTFLSYINAKADKCGYNAFLDKAITYPPPSPFPTAPEITEDCQVWDEVVMAAYDINPCFNYYHLIDFCPYLWDVLGFPSLASGPNNYFNRSDVQKILHVPPTDYSVCSETVIFANGDGSDPSSWGPLPSVIERTNNTIIGHGWLDYLLFLNGSLATIQNMTWNGKQGFQRPPVEPLFVPYHYGLAELYWGDEPDPYNLDAGAGYLGTAHTERGLTFSSVYLSGHEIPQYVPGAAYRQLEFLLGRISSLSAKGNYTS

SEQ ID NO: 16 - protein, 547 aa, Meriphilus giganteus
TPTGRNLKLHEAREDLPAGFSLRGAASPDTTLKLRIALVQNNFAELEDKLYDVSTPSSANYGNHLSKEEVEQYIAPAPESVKAVNAWLTENGLDAHTISPAGDWLAFEVPVSKANELFDADFSVFTHDESGLEAIRTLAYSIPAELQGHLDLVHPTVTFPNPNAHLPVVRSTQPIRNLTGRAIPASCASTITPACLQAIYGIPTTKATQSSNKLAVSGFIDQFANKADLKSFLAQFRKDISSSTTFSLQTLDGGENDQSPSEAGIEANLDIQYTVGLATGVPTTFISVGDDFQDGNLEGFLDIINFLLGESNPPQVLTTSYGQNENTISAKLANQLCNAYAQLGARGTSILFASGDGGVSGSQSAHCSNFVPTFPSGCPFMTSVGATQGVSPETAAAFSSGGFSNVFGIPSYQASAVSGYLSALGSTNSGKFNRSGRGFPDVSTQGVDFQIVSGGQTIGVDGTSCASPTFASVISLVNDRLIAAGKSPLGFLNPFLYSSAGKAALNDVTSGSNPGCSTNGFPAKAGWDPVTGLGTPNFAKLLTAVGL

SEQ ID NO: 17 - protein, 541 aa, Lecanicillium sp.
APAPHGPLVKFGEITKLPSKWIATGAADSDAVIKAQIGIKQNNIKGLQDKLADIADPNSPNYGQWLSKEEVDKYSAPAAADVAAVKAWLASSGITDVTMPTNDWIEFSVPVSKMESLLGSKYEWFVHLETGEKVPRTKQFSVPQNLHDLIDVVTPTTVLYHNMGPHAHASPQAADASGLTSPASIKSAYNVDYKGTGNTLVGTTGFLGVGASHQDYANFARQFSPGLTDFKDVSINGGSNSGDGSALEGNLDTQYCGALAAPNPSEYLAHAPEGSDGSSFNDAMLAFGNYLNANSNPPSAVSTSYGGEEDGTDPNYMDRICNEFMKAGSRGVSIFFSSGDNGVGGNGESSCYNGYYPLWPASCPYVTTVGGTEFDGSGREVVANFEQYNKNVKSPGGGFSNHFPAPSYNKNVTTAYANSLSAAQKQRLNPNGRGFPDIALVSVKYQVNVNGQISQVLGTSASSPSMAGLVGLLNDYRKTQGKPNLGFINPLLYSDKVKPALRDVTSGANKGCDSSGLPAKTGWDAASGLGSFDFAKLRTLV

SEQ ID NO: 18 - protein, 633 aa, Talaromyces proteolyticus
VPAPSKRHVVHERRDALPHSWSEPRRVDGRTQLPVRIGLTQSNIDESHDMLMDIASPSSPNYRKYMTVHEVNELFAPAGEAVSAVRDWLESAGIAAERVTQSANKQWLQFDGDAAEVESLLGAEYYIYTHDTNGRSHMGCEKYHVPEHISHHIDYIIPGVKSLEVREPQPAELEKRTFGFRKPQPPLFKALPESLETIINSILGGLLDLCSTVITPSCIKTLYNITEGTTATKGNELGIFEDLGDYYSQTDLDLFFTLFYSQIPAGTGPTLKGIDGAQAPTQTLTQAGPESDLDFQVSYPIIWPQNSILFQTDDANYEANYTFNGFLNNFLDAIDGSYCTYSAFGIDGNTADDPPYPDPASNGYKGSLQCGVYEPTNVISISYGGDEAGLSVNYQKRQCNEYKKLGLQGVSVVVSSGDSGVAGADGCLGGGKIFNPDFPAGCPYITTVGATYLPSGASSTSDSEVAVSRFPSGGGFSNIYSQPSYQSDAVNTYLTQHTPPYPAYETSDNSSVGANGGIYNKAGRGYPDVAAVGDNIVIFNAGAPTLIGGTSASAPIFASILTRINEVLLAKKGTTVGFVNPTLYANPDAFHDITSGDNPGCSTNGFSTAPGWDPVTGLGTPNYPALLKVFLGE

SEQ ID NO: 19 - protein, 371 aa, Penicillium ranomafanaense
VPTGGKKSFTVNQVAVSATKTQNFANNYARALAKYGAKVPTHVQAAAQQSGSATTTPESDDEEYLTPVNVGGTTLNLDFDTGSADLWVFSSELPASEQTGHSLYKPNNGTKLSGYTWSISYGDGSSASGDVYRDTVSVGGVKATGQAVEAASTISQQFTQDQNNDGLLGLAFSSINTVKPKSQTTFFDTVKSTLASPLFAVSLKHNAPGSYDFGFIDKSKYTGSLTYTDVDSSQGFWGFTADSYKIGSTTGSSIKGIADTGTTLLLLDDEVVSAYYKQVSGAASDSSAGGYTFDCSSTLPDFTVSISGYDAVVPGSLINYTPVSQGSSKCLGGIQSNSGLGFSIFGDIFLKSQYVVFDSNGPRLGFAAQSS

SEQ ID NO: 20 - protein, 578 aa, Aspergillus oryzae
EAFEKLSAVPKGWHYSSTPKGNTEVCLKIALAQKDAAGFEKTVLEMSDPDHPSYGQHFTTHDEMKRMLLPRDDTVDAVRQWLENGGVTDFTQDADWINFCTTVDTANKLLNAQFKWYVSDVKHIRRLRTLQYDVPESVTPHINTIQPTTRFGKISPKKAVTHSKPSQLDVTALAAAVVAKNISHCDSIITPTCLKELYNIGDYQADANSGSKIAFASYLEEYARYADLENFENYLAPWAKGQNFSVTTFNGGLNDQNSSSDSGEANLDLQYILGVSAPLPVTEFSTGGRGPLVPDLTQPDPNSNSNEPYLEFFQNVLKLDQKDLPQVISTSYGENEQEIPEKYARTVCNLIAQLGSRGVSVLFSSGDSGVGEGCMTNDGTNRTHFPPQFPAACPWVTSVGATFKTTPERGTYFSSGGFSDYWPRPEWQDEAVSSYLETIGDTFKGLYNSSGRAFPDVAAQGMNFAVYDKGTLGEFDGTSASAPAFSAVIALLNDARLRAGKPTLGFLNPWLYKTGRQGLQDITLGASIGCTGRARFGGAPDGGPVVPYASWNATQGWDPVTGLGTPDFAELKKLALGN

SEQ ID NO: 21 - protein, 456 aa, Talaromyces liani
APASTTKDNVSSVVKNGVTYTVFEHAATGAKMEFVKNSGICETTPGVNQYSGYLSVGNNMNMWFWFFEARNNPQTAPLAAWFNGGPGCSSMIGLFQENGPCHFVNGASTPSLNEYSWNNYANMLYVDQPIGVGFSYGTDDVTSTVTAAPYVWKLLQAFYAQFPEYQSRDFAIFTESYGGHYGPEFAAYIQEQNSGIAAGSVSGENINLIALGVNNGWIDPAIQEKAYIDFSYNNSYQQLIDDSQRTNLLSDYNDQCLPAIQQCAQTGRNSDCQNADNVCYDTIEGPISSSGNWDVYDIREPSNDPYPPSTYSSYLSNSRVVKAIGAQTSYQECPNGPYNKFASTGDNPRSFLSTLSSVVQSGIHVLVWAGDADWICNWLGNYRVANAVDFPGHAEFSAKALAPYTVNGTEKGMFKNVDNFSFLKVYGAGHEVPYYQPATALQVFEQILQNKSITST

SEQ ID NO: 22 - protein, 589 aa, Thermoascus thermophilus
EVFERLRAVPEGWRFSATPSDDQPIRLQIALQQHDVEGFERAVLDMSTPSSPNYGKHFQSHDEMKRMLLPSDDAVDAVLDWLQSAGITDIEEDADWINFRTTVGVANELLDTQFQWFVSETSSHVRRLRALEYSIPESVTPHIHMVQPTTRFGQIGRHHTTSREKPIVSGADIHASIAGANNQTTGTDCNTEITPKCLQDLYKFGGYKASANSGSKVGFCSYLEEYARYDDLALFEEALAPYAAGQNFSVITYNGGLNDQHSSSDSGEANLDLQYIVGVSAPLPVTEFSTGGRGELVPDLDQPNPADNSNEPYLDFLQNVLKLDQKDLPQVISTSYGENEQSVPEKYARSVCNLFMQLGSRGVSVIFSSGDSGVGSACLTNDGKNQTRFMPQFPASCPWVTSVGSTQHIAPEEATYFSSGGFSDLWPMPDYQKSAVGEYLDRLGSKWAGLYNPQGRGFPDVAAQGVNFNVYDKGSLKRFDGTSCSAPTFAGVIALLNDARLRARQPPMGFLNPWLYGAGKGGLNDIVNGGSTGCDGNARFGGAPNGSPVVPFASWNATQGWDPVSGLGTPDFSRLLKLAVPSRVGGRLA

SEQ ID NO: 23 - protein, 413 aa, Pyrococcus furiosus
AELEGLDESAAQVMATYVWNLGYDGSGITIGIIDTGIDASHPDLQGKVIGWVDFVNGRSYPYDDHGHGTHVASIAAGTGAASNGKYKGMAPGAKLAGIKVLGADGSGSISTIIKGVEWAVDNKDKYGIKVINLSLGSSQSSDGTDALSQAVNAAWDAGLVVVVAAGNSGPNKYTIGSPAAASKVITVGAVDKYDVITSFSSRGPTADGRLKPEVVAPGNWIIAARASGTSMGQPINDYYTAAPGTSMATPHVAGIAALLLQAHPSWTPDKVKTALIETADIVKPDEIADIAYGAGRVNAYKAINYDNYAKLVFTGYVANKGSQTHQFVISGASFVTATLYWDNANSDLDLYLYDPNGNQVDYSYTAYYDFEKVGYYNPTDGTWTIKVVSYSGSANYQVDVVSDGSLSQPGSSP

SEQ ID NO: 24 - protein, 387 aa, Trichoderma reesei
LPTEGQKTASVEVQYNKNYVPHGPTALFKAKRKYGAPISDNLKSLVAARQAKQALAKRQTGSAPNHPSDSADSEYITSVSIGTPAQVLPLDFDTGSSDLWVFSSETPKSSATGHAIYTPSKSSTSKKVSGASWSISYGDGSSSSGDVYTDKVTIGGFSVNTQGVESATRVSTEFVQDTVISGLVGLAFDSGNQVRPHPQKTWFSNAASSLAEPLFTADLRHGQNGSYNFGYIDTSVAKGPVAYTPVDNSQGFWEFTASGYSVGGGKLNRNSIDGIADTGTTLLLLDDNVVDAYYANVQSAQYDNQQEGVVFDCDEDLPSFSFGVGSSTITIPGDLLNLTPLEEGSSTCFGGLQSSSGIGINIFGDVALKAALVVFDLGNERLGWAQK

SEQ ID NO: 25 - protein, 408 aa, Rhizomucor miehei
RPVSKQSESKDKLLALPLTSVSRKFSQTKFGQQQLAEKLAGLKPFSEAAADGSVDTPGYYDFDLEEYAIPVSIGTPGQDFLLLFDTGSSDTWVPHKGCTKSEGCVGSRFFDPSASSTFKATNYNLNITYGTGGANGLYFEDSIAIGDITVTKQILAYVDNVRGPTAEQSPNADIFLDGLFGAAYPDNTAMEAEYGSTYNTVHVNLYKQGLISSPLFSVYMNTNSGTGEVVFGGVNNTLLGGDIAYTDVMSRYGGYYFWDAPVTGITVDGSAAVRFSRPQAFTIDTGTNFFIMPSSAASKIVKAALPDATETQQGWVVPCASYQNSKSTISIVMQKSGSSSDTIEISVPVSKMLLPVDQSNETCMFIILPDGGNQYIVGNLFLRFFVNVYDFGNNRIGFAPLASAYENE

SEQ ID NO: 26 - protein, 548 aa, Lenzites betulinus
KPMGRNLKVHEAREEIPDGFSLQGSAAPDTTLKLRIALVQSNFAELEQKLYDVSTPSSPNYGAHLSKEEVEQLVAPSADSVDAVNAWLKENDLSAQTISPAGDWLAFEVPVSKANELFDADFSVFTHDQTGLEAIRTMSYSIPAELQGHLDLVHPTVTFPNPYSHLPVVRSPIKASQNLTSRATIPASCASTITPACLQDIYGIPTTKATQSSNKLAVSGFIDQFANSADLATFLKKFRTDISSTTTFALQTLDGGSNSQSGSQAGVEANLDIQYTVGLASGVPVTFISVGDNFQDGDLEGFLDIINFLLAESAPPQVLTTSYGQNENTISVKLANQLCNAYAQLGARGTSILFASGDGGVSGSQSSSCSKFVPTFPSGCPFMTSVGATQGVNPETAADFSSGGFSNYFGIPSYQATAVKTYLTALGTTNSGKFNTSGRAFPDVSTQGVDFEIVVDGRTEGVDGTSCASPTFAAIISLVNDKLIAAGKSPLGFLNPFLYSTGASAFTDITSGSNPGCNTKGFPAKAGWDPVTGLGTPNFAKLLAAAGV

SEQ ID NO: 27 - protein, 547 aa, Neolentinus lepideus
GPAPRNLVLHESRDGVPEGFVKSSTASPDTTLKLRIALVQGDMASLEKALYDVSVPSSPLYGQHLSKQEVEEYVKPTQESVDAVNQWLSSEGITANTISPAGDWLQFSVPVSKANEMFDADFSVFTHTESGQQAIRTLSYSIPKELVGHLDLVHPTITFPNPYSHLPVVSSPAPRNLTIDASVPSSCGSTITPTCLQDLYGIPTTAATQSSNKLAVSGFIDQYANKADLKSFLTTYRKDISSSTTFTLETIDGGENPQDGSDAGVEANLDTQYTVGLATGVPTYFISVGDDYQDGDLEGFLDIVNYLLSMDQPQQVLTTSYGQNENTMSRSLANNLCNAYMQLGARGTSILFASGDGGVSGSQSGSCGSKFVPTFPSGCPYLTSVGATTGINPEVAASFSSGGFSNYWGVPSYQQSVVSSYISGLGSTNKGKYNSSGRGFPDVSAQGENVEIVVDGSTEGVDGTSCSSPIFASIVSLLNDELIAAGKSPLGFLNPFLYSDGASAFNDITSGDNPGCNTNGFSAKSGWDPVTGLGTPNYAKLRTAVGF

SEQ ID NO: 28 - protein, 399 aa, Thermococcus sp.
VSAEKVRVIITIDKDFNENSVFALGGNVVARGKVFPIVIAELSPRAVERLKNAKGVVRVEYDAEVQVLKGKSPGAGKPKPSQPAQTIPWGIERIKAPDVWSITDGSSSGVIEVAILDTGIDYDHPDLAANLAWGVSVLRGKVSTKPKDYKDQNGHGTHVAGTVAALNNDIGVVGVAPAVEIYAVRVLDASGRGSYSDIILGIEQALLGPDGVLDSDGDGIIVGDPDDDAAEVISMSLGGLSDVQAFHDAIIEAYNYGVVIVAASGNEGASSPSYPAAYPEVIAVGATDVNDQVPWWSNRGVEVSAPGVDVLSTYPDDSYETLSGTSMATPHVSGVVALIQAAYYNKYGSVLPVGTFDDNTMSTVRGILHITADDLGSSGWDADYGYGIVRADLAVQAVN

SEQ ID NO: 29 - protein, 396 aa, Thermococcus sp.
EKVRVIITIDKDFNENSVFALGGNVVARGKVFPIVIAELSPRAVERLKNAKGVVRVEYDAEVQVLKGKSPGAGKPKPSQPAQTIPWGIERIKAPDVWSITDGSSSGVIEVAILDTGIDYDHPDLAANLAWGVSVLRGKVSTKPKDYKDQNGHGTHVAGTVAALNNDIGVVGVAPAVEIYAVRVLDASGRGSYSDIILGIEQALLGPDGVLDSDGDGIIVGDPDDDAAEVISMSLGGLSDVQAFHDAIIEAYNYGVVIVAASGNEGASSPSYPAAYPEVIAVGATDVNDQVPWWSNRGVEVSAPGVDVLSTYPDDSYETLSGTSMATPHVSGVVALIQAAYYNKYGSVLPVGTFDDNTMSTVRGILHITADDLGSSGWDADYGYGIVRADLAVQAVN

SEQ ID NO: 30 - protein, 572 aa, Thermomyces lanuginosus
APFQVVERLSAPPDGWIKKEKAAPSAQIQFRLGLPQQNSEQLEQLALNIATPGHELYRKHLKRDEIKALVRPLASVSEKVLAWLRDEGVPEDRIHDDGAWIKFTVPVSTAEKLLNTEFFVFHNERTGAEQIRTLEYSVPQDIHSLVKFIQPTTHFSSLGPQVRRVVPLDVLPKLRITLEDCNKKITPDCLKQLYKIGDYVAPEDPRNRIGISGYLEQFARYADFEEFLESYAPDRTDANFTVVSINGGRNDQNSTLDSTEASLDIDYAVTLSYKTQAVYYTTAGRGPLVPDESQPDPNEVSNEPYMEQLQFLLDLPDEELPTVLTTSYGENEQSLPGSYADETCNMFRLLGMRGVSVIFSSGDWGTGIVCKANDGSERIKFDPVYPASCPYVTSVGGTTGVNPERAVEFSSGGFSDRFPRPKYQDEAVRSYLTKLGDHWKGLYNESGRAFPDVAAQADNFVVRDQGQWVSVGGTSASAPVFAAIIANVNAELLKAGKPPLGFLNPWLYGLKGRGFTDVVHGGSTGCPGTVPWTGLPAGHVPYASWNATEGWDPVTGLGTPLYDELVKAALGK

SEQ ID NO: 31 - protein, 397 aa, Thermococcus thioreducens
EKPELVRVIVHVDRGHFNTADVATIGGHVVYQFKLIDAVVVEVPSTAVGRLKKLPGVKMVEFDHKARILAGPPSWLGGGQPSQQIPWGISRVRAPDVWGITDGSGGVIEVAVLDTGVDYDHPDLAGNIAWCVSTLRGRVTTNPAQCKDQNGHGTHVIGTIAALNNDIGVVGVAPGVEIYSIRVLDASGSGSYSDIAIGIEQALLGPDGILDKDGDGIIVGDPDDDAAEVISMSLGGPTDDQYLHDMIITAYNYGVVIVAASGNEGASSPSYPAAYPEVIAVGASDVNDQIASWSNRQPEVSAPGVDILSTYPDDTYETLSGTSMATPHVSGVVALIQAAYYNKYGKVLPVGTFDDMGTNTVRGILHVTADDLGDAGWDIYYGYGIVRADLAVQAAIG

SEQ ID NO: 32 - protein, 549 aa, Polyporus arcularius
KPMARSMKLHESREGIPEGFSLRGAAQPEQTIKLRLALVQSNFAELERKLMDVSTPSSANYGKHLSKAEVQQLVAPTQDSVDAVKSWLKENDISAKTISATGDWLSFEVPVSKANELFDADFSIYTHDETGTEAVRTLSYSIPAELQGHLDLVHPTVTFPNPRGLPPVFTAPIKAEAQNLTSRATIPSSCARTITPACLQAIYNIPSTPATESSNKLAVTGFIEQFANKADLKTFLTRFRTDISSSTSFTLQTLDGGSNPQSSSEAGVEANLDIQYTVGVATGVPTVFISVGEDFQDGDLEGFLDVVNSLLDEDTPPFVMTTSYGQNENTISRNLANNLCNAYAQLGARGVSILFASGDGGVAGSQSASCSKFVPTFPSGCPFMTSVGATQGFSPETAADFSSGGFSNYFAIPDYQTSAVSGYIKALGNTNSGKYNATGRGFPDIATQGVNFEVVVGGQSGTVEGTSCSSPTLASIISLLNDRLIAAGKSPLGFLNPFLYSTGTSALNDITSGSNPGCNTNGFPAKAGWDPVTGLGTPDFNKLLSAVGL

SEQ ID NO: 33 - protein, 548 aa, Ganoderma lucidum
KSTTRNLKLHETRQGAPSGFSHTGSADPNQTLKLRLALVQGNTAELERKLYDVSTPSSANYGKHLSKEEVRQLVAPAQGSVDAVNAWLRENGITAKSTSAAGDWLSFEVPVSKANELFDADFSVFKHDDTGVKAVRTLSYSIPAELQGHLDLVHPTVTFPNPNGHMPVFQAPVKDTDAVQNFSARAVPSSCSNTITPACLQALYNIPSDAATQSSNKLAVTGFIEQYANQVDLAVFLKQYRADISSNTTFALQTLDGGSNSQTNVPGVEANLDIQYTVGIATGVPTVFISVGDQYQDGDLEGFLDVINFLLDEDTPPYVVTTSYGQDEHTISRKLAQNLCNAYAQLGARGVSILFASGDGGVAGSRSNSCSKFVPTFPSGCPYMTSVGATQGVPETAADFSSGGFSNYFGTPDYQASAVKSYLSTLGSTNRGKFNASGRGFPDVATQGVNFEVIVDGEVEGVSGTSAASPMFAAIVALLNDKLIAAGKSPLGFLNPFLYSKGVEALNDITTGSNPGCGTIGFPAKEGWDPVTGLGTPDFQKLASAAGL

SEQ ID NO: 34 - protein, 548 aa, Ganoderma lucidum
KTATRNLKLHETSQGAPSGFSLTGSADPDQTLKLRLALVQGNVAELERRLYDVSTPSSPNYGKHLSKSEVQQLVAPAQDSIDAINAWLKENGISAKTTSATGDWLSFEVPVSKANELFDADFSVYKHHDTGMEVVRTLSYSIPAELQAHLDLVHPTVTFPNPKGHPPVFQAPAMITNDVQNFSAGAVPSSCSSRITPACLQALYNIPSDPATQPSNKLAVTGYIEQYANQDDLAVFLKEYRADMSSNTTFTLQTLDGGVNSQTDEAGIEANLDVQYTVGIATGVPTVFISVGDQYQDGNLEGFLDVVNFLLDEDTPPYVMTTSYGQDEHTMSRKLAQNLCNAYAQLGARGVSILFASGDGGVAGSRSSSCSKFVPTFPSGCPYMTSVGATQGVPETAADFSSGGFSNYFGIPDYQASAVSGYLSALGHTNKGKYNASGRGFPDVSTQGVNFEVMVDGALEGVSGTSAASPTFAAVVALLNDRLIAAGKSPLGFLNPFLYSKGVSALNDITSGSNPGCRTNGFPAKEGWDPVTGLGTPDFQKLASAAGL

SEQ ID NO: 35 - protein, 541 aa, Ganoderma lucidum
KPTARNLRLHETRQGAPSGFSLTGSADPNQTVRLRLALVQGNTGELERKLYDVSTPSSANYGKHLSKAEVQQLVAPAQGSIDAVNAWLKENDITAKTISATGDWLSFEVPVNKANELFDADFSVFKHDDTGMEAVRTLSYSIPAELQGHLDLVHPTVTFPNPKGNLPLFQTPIKSKRDVPADCSNNITPACLQALYNIPSDAATQSSNTLAVTGYIEQYANQQDLTSFLGQFRPDISSNTTFALQTIDGGSNSQNGSDAGGEANLDIQYTVGLATGVPTVFISVGEQYQDGDLGGLLDVINFVLAEDAPPNVITTSYGQNENTISLKLAQNLCNAYAQLGARGVSILFASGDGGVAGSQSDNCTQFVPTFPSGCPYMTSVGATQGVPETAADFSTGGFSNLFSVPDYQAAAVQSYLSALGGTYQGLFNASGRAFPDVSTQGVNFETVVDGSVSGASGTSAASPTFAAIVALLNDRLVAAGKSPLGFLNPFLYSTGASALNDIATGSNPGCGTNGFSAQKGWDPVTGLGTPDFQKLAAAAGL

SEQ ID NO: 36 - protein, 547 aa, Trametes sp.
TPTGRNLKLHEAREDIPTGYSLRGAASPDTTLKLRLALVQNNFAELEDKLYDVSTPSSANYGNHLSKEEVEQYIAPAPESVKAVNAWLTENGLDAHTISPAGDWLAFEVPVSKANELFDADFSVFTHDESGLEAIRTLAYSIPAELQGHLDLVHPTVTFPNPNAHLPVVRSTKPIQNLTGRAIPASCASTITPACLQAIYGIPTTKATQSSNKLAVSGFIDQFANSADLKSFLSTFRKDISSSTTFALQTLDGGQNNQSPSQAGIEANLDIQYTVGLATGVPVTFISVGDNFQDGDLEGFLDIINFLLSESNPPQVLTTSYGQNENTISAKLANQLCNAYAQLGARGTSILFASGDGGVAGSQSSSCRNFVPTFPSGCPFMTSVGATQGVSPETAADFSSGGFSNVFGIPSYQTSAVSGYLSALGNTNSGKFNRSGRGFPDVATQGVNFQIVSGGDTGGVDGTSCASPTFASVISLINDRLIAAGKSPLGFLNPFLYSAAGKAALNDVTSGSNPGCNTNGFPAKAGWDPVTGLGTPNFAKLLTAVGL

SEQ ID NO: 37 - protein, 553 aa, Cinereomyces lindbladii
KPTARNLLVHESLDGVPTGFQLVGPASPDTVLSMRIALVQSDPAGLEAALYDVSTPSSASYGNHLSKAEVEKFVSPTSESVQAVNAWLTENDLTATQLSPAGDWLGFEVPVSKAEDLFGTQFSVFTHEATGMQTVRTLSYSIPSELQGHLDLVFPTINFPDPNANLPVFRHASKKREVTTLNANLTSDAVPSSCADTITPACLQALYGIPTTPATSSTNQLGVSGFIDQFANQADLKTFLQNFRTDISSSTTFSLETLDGGSNSQNRGDAGVEANLDTQYTVGLATDVPTVFISVGEDNQDGSLGGFLDIINFLLDQDSPPQVLTTSYGQNENTVSRAVANNLCNAYAQLGARGTSILFASGDGGVSGSQSASCRTFVPTFPSGCPFMTSVGATTGINPETAATFSAGGFSNYFGTPSYQASAVSSYLAALGSTNSGKFNTSGRGYPDVSTQGENFEIVVSGEEEGVDGTSCASPTFASIISLVNDRLIAAGKPPLGFLNPFLYSTGASAFTDITTGDNPGCNTNGFPAKSGWDPVTGLGTPNFSKLLTAVGL

SEQ ID NO: 38 - protein, 559 aa, Trametes versicolor
AVASTLQLHEARKGIPAGFSLHGAASPDTVLNLRMALVQSNFAGLEERLYDVSTPSSANYGKHLSKAEVEQYVAPRQQSITAVKAWLAANGLSGTSISPAGDWIAAKVPVSKANKLLGAQFSVFNNDATGRQIIRTLAYSIPAELKGHLDLVHPTITFADIKPLVPVVSARRESRVLVDSDLVANTIPASCNAAITPACLQDLYGIPSTPATQSSNQLGVSGFIDQFANQADLATFLTEFRPDVSNSTTFTLQTLDGGQNPQDPSDAGVEANLDTQYTVGVATNVPTTFFSVGDDTKDGIFGFLDLISFLLAAAAPPQVLTTSYGADEGGLSANLVRNLCQAYAQLGARGTSILFSSGDGGVSGSQAEGCVDFVPTFPSGCPFLTSVGATQLTTASGLTVETAAGFSSGGFSNYFPTPPYQQAVVDAYIKKTLVNGTVNEGLFNASGRAFPDVSAVGVDYLIVVGGGTDIVSGTSASSPLFASVIALINDRRLAAGKPPLGFLNPFLYSQAGASALNDVTVGSNPGCASPGFPAAQGWDPVTGLGTPNFAKLLAAALAL

SEQ ID NO: 39 - protein, 541 aa, Paecilomyces hepialid
APAPHGPLVKFGEIRKLPSKWVATGAADANAVIKGQIGIKQNNIQGLQAKLADIADPNSPNYGQWLSKEEVDKYSAPAAADVAAVKAWLASSGITDVTMPTNDWIEFSVPVSKMESLLGSKYEWFVHLETGEKVPRTKEFSVPQNLHDLIDVVTPTTVLYHNINPHTHSSPQAAGAAGLTSPASIKSAYNVDYKGTGNTLVGTTGFLGVGASHTDYANFGQQFSPGLKDFQDVSVNGGSNSGDGSALEGNLDTQYCGALAAPNPSEYLAHAPEGSDNNSFNDAMLAFGNYLNSARNPPSAVSTSYGGEEDGVDASYLDRICNEFMKAGSRGVSIFFSSGDNGVGGNGESSCQNGYYPLWPATCPYVTTVGGTEFDNSGREVVANFEQYNKNIKSPGGGYSNHFAAPSYNKAVTTSYANGLAAPQKQRLNPNGRGYPDISLVSVKYQVNVNNQISQVLGTSASSPSIAGLVGLLNDYRKTQGKPNLGFINPLLYSDKVKPALRDVTSGSNKGCDSVGLPAKTGWDAASGLGSFDFGKLRTLV

SEQ ID NO: 40 - protein, 541 aa, Isaria tenuipes
APAPHGPLVKFGELKKLPSQWVATGAANGDAVIKAQIGIKQNNIKGLQDKLAEISDPNSPSYGQWLSKEEVAKYTAPADADVAAVKAWLSSAGITEVTMPTNDWLEFSVPVSKMESLLGSKYEWFVHLETGEKAPRTKEFSVPQNLHGIIDVVTPTTVLYHNINPNSHGNELSASASGLTSPASIKSAYNVDYKGTGNTLVATTGFLGVGASHNDYLAFGHQFSPGLKDFQDVSVNGGSNSGDGSALEGNLDTQYCGALASPNPSQYLANSPEGSDNNSFNDAMTAFGNYLNSASNPPSAVSTSYGGEEDGVDAGYLDRICNEFMKAGSRGISVFFSSGDNGVGGNGEPSCQNGYYPLWPATCPYVTTVGGTEFDDSGREVVANFEQYNKNVKSPGGGYSNHFPAPDYNKNVTTAYANSLSAAQQQRLNPNGRGFPDISLVSVKYQVSLNGQTKQVLGTSASSPSVAGLVGLLNDYRKTQGKSNLGFLNPLLYSGKVNAALRDVTSGSNKGCDSVGLPAKSGWDAASGLGSFDFAKLRSLI

SEQ ID NO: 41 - protein, 578 aa, Aspergillus tamarii
EAFEKLSAVPKGWHYSSTPEGSTSVCLKIALAQKDAAGFEKRVYEMSDPDHPNYGQHFTTHEEMKRMLLPRDDTVDAVRQWLENGGVTDVRQDSDWINFCTTVDTANKLLNAQFKWYVSDVKHIRRLRTLQYDVPGSVASHVNTIQPTTRFGKITPKKAVTHSKPSQLDVTALAAAVVAKNISHCDSIITPTCLKELYNIGDYQADANSGSKIAFASYLEEYARYADLENFENYLAPWAKGQNFSVITYNGGLNDQNSSSDSGEANLDLQYILGVSAPLPVTEFSTGGRGPLVPDLTQPDPNANSNEPYLEFFQNVLKLDQEQLPQVISTSYGENEQEIPEKYARTVCNLIAQLGSRGVSVLFSSGDSGVGEGCMTNDGTNRTHFPPQFPAACPWVTSVGATYKTTPERATYFSSGGFSDYWARPEWQEEAVSSYLETIGDAFKGLYNASGRAFPDVAAQGMNFAVYDKGTLGEFDGTSASAPAFSAIIALLNDARLRAGKPTLGFLNPWLYKTGRQGLQDITLGASTGCTGRARFGGAPDGGPVVPFASWNATQGWDPVTGLGTPDFAELKKLALAN

SEQ ID NO: 42 - protein, 587 aa, Aspergillus brasiliensis
EIFEKLSGVPNGWRYANNPQGNEVIRLQIALQQHDVTGFEQAVMDMSTPGHADYGKHFRTHEEMKRMLLPSDTAVDSVRDWLESAGVHNIQVDADWIKFHTTVTKANALLDADFKWYVSEARHIRRLRTLQYSIPDALVSHINMIQPTTRFGQIQPNRATMRSKPKHADETFLTAATLAQNTSHCDSIITPSCLKQLYNIGDYQADPKSGSKIGFASYLEEYARYADLEKFEQHLAPNAIGQNFTVVQFNGGLNDQLSTKDSGEANLDLQYILGVSAPLPVTEYSTGGRGELVPDLSSPDPNDNSNEPYLDFLQNILKLNNSDLPQVISTSYGEDEQTIPVPYARAVCNLYAQLGSRGVSVIFSSGDSGVGAACLTNDGTNRTHFPPQFPASCPWVTSVGATSKTSPEQAVSFSSGGFSDLWPRPSYQHAAVQTYLTEHLGNKFSGLFNASGRAFPDVSAQGVNYAVYDKGILGQFDGTSCSAPTFSGVIALLNDARLRAGLPVMGFLNPFLYGAGSKLGGLNDIVTGGSVGCDGRNRFGGTPNGSPVVPFASWNATTGWDPVSGLGTPDFAKLKVVALGESEGDEN

SEQ ID NO: 43 - protein, 582 aa, Aspergillus iizukae
EVFDTLAAVPKGWHYSHTPRADQPISLKIALKQHNVEGFEQAVLDMSTPGHEHYGKHFREHDEMKRMLLPSDATVDAVKDWLLAADVTDYEVDADWINLHTTVQQANELLDTEFAWYVSDVRAVRRLRTLRYSVPDAVAPHINMVQPTTRFGQIHPDRATFRAGSTHFGAHILSAMSAVGDVSSANVTCDDVITPLCLKELYKVDGYRAEAEHGSKIAFASYLEEYARYDDMVRFQEKLAPYAKGENFSVILYNGGVDDQQSTSDSGEANLDLQTIMGLSAPLPITEYITGGRGKLIPDLSQPDPNDNSNEPYLEWIQNVLKHSPEELPQVISTSYGEDEQTIPRGYAESVCNLLAQLGSRGVSVIFSSGDSGVGSACQTNDGTNTTHFPPQFPASCPWVTSVGATSKTHPEEAVYFSSGGFSDLWARPAWQDDAVSTYIESIGGKFAGLYNASGRAFPDVSAQGQNYAIFDKGRLGKMDGTSCSAPAFAGIVSLLNDARLRANRPVLGFLNPWLYGTAREGLNDIVHGGSKGCDGRDRFGGKPNGSPVVPYASWNATPGWDPVSGLGTPNFATLVQVALHD

SEQ ID NO: 44 - protein, 456 aa, Penicillium sp.
APASTAKDSVSSVVKNGVKYTVFEHAATGAKMEFVKNSGICETTPGVNQYSGYLSVGSNMNMWFWFFEARNNPQQAPLAAWFNGGPGCSSMIGLFQENGPCHFVNGDSTPSLNEYSWNNYANMLYVDQPIGVGFSYGTDDVTSTVTAAPYVWKLLQAFYAQFPEYESRDFAIFTESYGGHYGPEFASYIQDQNAAIKAGSVSGENINLVALGVNNGWIDSTIQEKAYIDFSYNNSYKQLIDDSQRTSLLSAYNDQCLPAIQKCTSSGSNSDCKNADSVCYNQIEGPISSSGDWDVYDIREPSNDPYPPSTYSTYLSNADVVKAIGAQSSYQECPNGPYNKFTSTGDNPRSFLSTLSSVVKSGINVLVWAGDADWICNWLGNYEVANAVDFSGHTDFSAKDLAPYTVNGTEKGLFKNVDNFSFLRVYGAGHEVPYYQPDTALQVFEQILQKKPIFST

SEQ ID NO: 45 - protein, 456 aa, Aspergillus denticulatus
STASAAKDSVSSIVKNGVKYTVFEHAATGAKMEFVKNSGICETTPGVNQYSGYLSVGDNMNMWFWFFEARNNPQQAPLAAWFNGGPGCSSMIGLFQEHGPCHFVNGEDTPSLNEYSWNNYANMLYVDQPIGVGFSYGTDDVTSTVTAAPYVWKLLQAFYAQFPEYESRDFAVFTESYGGHYGPEFASYIQQQNAAIKAGTVSGENINLIALGVNNGWIDSAIQEKAYIDFSYNNTYKQLISSSDRTRLLSVYNSQCLPAIQKCTSTGTTAACRNADSVCYNNIEGPISSSGDWDVYDIREPANDPYPPATYSTYLADPDVVKAIGAQTSYQECPNGPYNKFASTGDNPRSFLSTLSNVVKSGINVLVWAGDADWICNWLGNYEVANAVDYPGQSEFEAKDLAPYTVNGAEKGMFKNVDNFSFLRVYGAGHEVPYYQPETALQVFQQTLQKKPIFST

SEQ ID NO: 46 - protein, 456 aa, Hamigera sp.
APASTAKDTLSSIVKNGVTYNVFEHADSGAKIEFVKNSGICETTPGVNQYSGYLSVGDNMNMWFWFFEARNNPQKAPLAAWFNGGPGCSSMIGLFQENGPCHFVNGENTPSLNEYSWNNYANMLYVDQPIGVGFSYGTDDVDSTVTAAPYVWKLLQAFYAQFPEYESRDFAIFTESYGGHYGPEFAHYIQQQNAAIKSGSVKGENINLIGLGVNNGWIDSAIQEKAYIDFSYNNSYKQLIDFSQRTSLMRAYKNQCLPAIQKCYQTGTNADCTDASSVCYNNIEGPISSSGDWDVYDIREPSNDPYPPKTYSSYLSDPKVVKAIGARTNYKECPNGPYNKFSTTGDNPRSFLSTLSDVVKSGINVILWAGDADWICNWLGGYGVANAVDYPGHAQFRAKALAPYTVNGTEKGQFKTVDNFQFLKVYGAGHEVPYYQPETALQVFEQILQKKPIHST

SEQ ID NO: 47 - protein, 456 aa, Penicillium janthinellum
APASTAKDTVSSVVKDGVTYTVFEHAATGAKMEFVKNSGICETTPGVNQYSGYLSVGSNMNMWFWFFEARNNPQQAPLAAWFNGGPGCSSMIGLFQENGPCHFVNGESTPSLNENSWNNYANMIYIDQPIGVGFSYGTDRVTSTVTAAPYVWKLLQAFYAQFPEYESRDFAIFTESYGGHYGPEFASYIEQQNAAIKAGSVTGQNVNIVALGVNNGWIDATIQEKAYIDFSYNNSYQQIIDSSTRDSLLDAYNNQCLPALQQCAQSGSNSDCTNADSVCYQNIEGPISSSGDFDVYDIREPSNDPYPPKTYSTYLSDPTVVKAIGARTNYQECPNGPYNKFASTGDNPRSFLSTLSSVVQSGINVLVWAGDADWICNWLGNYAVANAVDFPGNAQFSAMDLAPYTVNGVEKGQFKTVDNFSFLKVYGAGHEVPYYQPDTALQVFKQILQKKPISST

SEQ ID NO: 48 - protein, 456 aa, Penicillium vasconiae
APASTAKDSVSSVVKNGVKYTVFEHAATGAKMEFVKNSGICETTPGVNQYSGYLSVGSNMNMWFWFFEARNNPQQAPLAAWFNGGPGCSSMIGLFQENGPCHFVNGDSTPSLNEYSWNNYANMLYVDQPIGVGFSYGTDDVTSTVTAAPYVWKLLQAFYAQFPEYESRDFAIFTESYGGHYGPEFASYIQEQNAAITAGSVSGQKINLIALGVNNGWIDSTIQEKAYIDFSYNNSYQQLIDDSQRTSLLSAYNKQCLPAIQKCTQTGSNSACQNAANVCYNNIEGPISSSGDWDVYDIREPSNDPYPPSTYSTYLANSDVVKAIGAQSSYQECPNGPYNKFASTGDNPRSFLSTLSSVVKSGINVLVWAGDADWICNWLGNYEVANAVDFSGHAEFSAKDLAPYTVNGAEKGMFKNVDNFSFLKVYGAGHEVPYYQPETALQVFEQILQKKPISST

SEQ ID NO: 49 - protein, 454 aa, Hamigera paravellanea
APSLRDKRSFVERDGVTYTVFEHAATGAKMEFVQNSGICETTPGVNQYSGYLSVGDNMNMWFWFFEARNNPTAAPLAAWFNGGPGCSSMIGLFQENGPCHFVNGESTPSLNEYSFNNYANVLYVDQPIGTGFSYGTDDVTSTVTAAPYVWKLLQAFYAQFPEYESRDFGIFTESYGGHYGPEFASYIQEQNAAIKAGSVSGDNINLVALGINNGWFDAGIQEKAYIDFSYNNSYRQIISSSQRSSYLDAYNHDCLPAIESCASSGTNSACKNAESVCYNGIEGPISSAADFDVYDVRQPSNDPYPPATYSTYLQSASVRKAIGARTKYQECPNGPYNKFETTGDNSRSFLSTLSDVVNTGITVLVWAGDADWICNWVGGHAVADAVTFARQKTFQAKPLEPYTVNGTEKGRFKTVDNFTFLRVYEAGHEVPYYQPETALQVFVQTMQKKAIFST

SEQ ID NO: 50 - protein, 453 aa, Talaromyces variabilis
AAVPQDKRSIVKRDGVTYNVFEHAATGAKMEFVKNSGICETTPGVNQYSGYLSVGDNMNMWFWFFESRNNASGAPLAAWFNGGPGCSSMIGLFQENGPCHFVNGEKKPSLNKYSFNEYANVLYVDQPIGVGFSYGTDDVTSTESAAPYVWKLLQAFYAQFPQYESRDFGIFTESYGGHYGPEFAHYLQQQNEGVKNGSVDGENINLVALGINNGWFDTQLQEGAYIDYAYSNNYKKIIDSSQRSSLEDSLKSDCLPAVKQCLSSGSDSDCENASDTCGQIESSIQQAADFDVYDVREPSNDPYPPSTYSDYLADSSVVKAIGAKSTYKECPNGPYYKFSSTGDNTRSFLSELSSVVQSGIQVLVWAGDADWICNYMGVQRVADAVEFDGSSQFSNATLKPYTVNGTKKGEYKNVDNFSYLRVYGAGHEVPYYQPAVALQVFKQTMQQQAIKST

SEQ ID NO: 51 - protein, 456 aa, Penicillium arenicola
APATHLQDKRSIVERDGVNYTVFEHAATGAKLEFVTNSGICETTSGVNQYSGYLSVGTNMNMWFWFFESRNSPSTAPLAAWFNGGPGCSSMIGLFQENGPCQFYDGASTPSLNPYSFNEYANMIYIDQPIGVGFSYGTDDVTSTVTAAPYVWKLIQAFYASFPAYESREFGLFTESYGGHYGPEFAYYIQQQNAAIASGTVTGDTIDIVALGINNGWIDSALQEKAYIEYSYNNSYKQIITSSQRTSYLSTYTNDCLPAINKCTTGGSNSACSNAADVCYNDIESPIMSDADFDVYDIRQPSNDAYPPETYVTYLQTSSVVKAIGASSTYQECPDAPYNKFATTGDNDRSFLATLSTVVQSGITVLLWAGDADWICNWVGNQYVADAVTWSGQSSFAAQTLTPYTVNGSEVGTFKTLDNLSFLRVYEAGHEVPYYQPATALQAFIQTMQKKALSST

SEQ ID NO: 52 - protein, 354 aa, Nocardiopsis kunsanensis
APAPQNPTEPAEATTMAEALERDLGLNEAEATDLIDAQESALDVDAEATEAAGEHYGGSLFDTETHDLTVLVTDSAAVPGVEAAGAEAAVVEHGVEGLDDLISDLDSAGAQEGVVGWYPEVENDTVVIETLEGADADVDALLSSAGVDPADVRVETTDEAPEVYANIVGGDAYTIGGSSRCSVGFPASDSYGQPGFVTAGHCGTTGSSVSIGNGSGVFSQSVFPGNDAAFVRGTSNFSLTNLVNRYNSGSDVAVSGSTQAPIGSQVCRSGSTTGWHCGTIQARGQTVSYPQGTVRDLTRTSVCAEPGDSGGSFISGSQAQGVTSGGSGNCSWGGTTYYQEVNPMLNSWNLNLST

SEQ ID NO: 53 - protein, 425 aa, Streptomyces parvulus
GTAPSPAAPTAAESLRADAAPPALLRAMERDLGLGREQAERRLGNEAEAGAVAGRLRADLGGDFAGAWVRGAESGTLTVATTDAADVPAIEARGAVAEVVRHSLADLGAAKSRLDRAAAHRDTAEAPVRYVDVRTNTVTVQAVRPSAARALLAAAGVDAGLARVETSAERPRPLYDLRGGEAYYINNSGRCSVGFPVTKGTQQGFATAGHCGRAGASTSGANRVAQGTFQGSVFPGRDMAWVAANSQWTATPYVSGAGGQNVQVAGSTQAPVGASVCRSGSTTGWHCGTIQQHDTSVTYPEGTITGVTRTTVCAEPGDSGGSYISGSQAQGVTSGGSGNCGSGGTTFFQPINPLLQNYGLTLKTTGGGGEDPGEPGEPGGTWAAGTVYRPGDTVTYGGATYRCLQGHQAQRGWEPANVPALWQRV

SEQ ID NO: 54 - protein, 350 aa, Saccharopolyspora endophytica
LTATIADPAGPPVSPELVTAMQRDLGLTADQAVARLGQEAVAARADSALRDALAGSYGGSYFDANLGKLVVGTTDAAKSDEVRAAGAEPRQVDASERQLDGIVEALNGRGAQVPAAVTGWYADVRENAVVVTTQPGTAEQATGFVRDAQVPQESVRVWESPAQPETYADVVGGYAYYTASGARCSMGFAVQGGFVTAGHCGAPGESTTQPTGYFAGSSFPGNDYAFVNTGTDDTGYPLVYNYSSGYVRVSGSAEAPLGSSICRSGSTTGWHCGTVLAKNQSVRYQEGTVSGLTRTNVCAEPGDSGGSFISGNQAQGMTSGGWGDCRTGGETYYQPVREALSAYGLTLLTQ

SEQ ID NO: 55 - protein, 355 aa, Luteus cellwall
ASGPLPQSPSPDSDVATTMAEALERDLNLTSTEAQELLTAQEAAFEADEAAAQAAGDAYGGSVFDTETLDLTVMVTDAAAVQAVEATGAKADVVSYGIDGLDTIIDDLNEADAPEGVVGWYPDIDSDTVVLEVLEGSGADVDALLAEAGVDASAVKVESTTEQPELYADIIGGLAYYMGGRCSVGFAATNASGQPGFVTAGHCGRVGTQVTIGNGRGVFERSVFPGNDAAFVRGTSNFTLTNLVSRYNSGGYATVSGSSVAPIGSSVCRSGSTTGWRCGTIQARGQTVTYPQGTIYNMTRTSACAEPGDSGGSFISGTQAQGVTSGGSGNCSWGGTTFYQEVNPMLNSWNLRLRT

SEQ ID NO: 56 - protein, 406 aa, Saccharothrix australiensis
GPPTTHQEESGLIAAMARDFKITPDQARARLVREAKAATTEQSLKSRLGGHYAGAWLNEGATELVVAVTDAAQAKVVEDAGATPKVVQRSQIQLDELKAKLDANKNAPKDVPAWYVDVKTNSVVVLARNTASAKAFARASGLSEADVRIEQSTEDPRPLIDVIGGNAYYMGSGGRCSVGFSVNGGFVTAGHCGRVGTTTTQPSGTFAGSTFPGRDYAWVRVSSGNTMRGLVNRYPGTVPVKGSNESSVGASVCRSGSTTGWHCGTIQQKNTSVTYPEGTISGVTRTNACAEPGDSGGSWLTGDQAQGVTSGGSGNCSSGGTTYFQPVNPILQAYGLQLVIEGGPTGTTGPTTTSSNPGGTTWQPGVAYTAGTTVTYEGVGYECLQGHTSQIGWEPSAVPALWERVG

SEQ ID NO: 57 - protein, 346 aa, Nocardiopsis baichengensis
DAFPEGTEPLAEAIERDLGVASGQADELLTAEESARSLEKEAEKAAGEAFAGAVFDTETHELTVSVADPSAVEAVEATGAETRVVEASQDELDAAMADLDAASEDGVSEEVTGWHVDLESNTVVVEALEGSEDAAEDLIADAGLDSAPVVVEKADAQPETFGAIVGGDAYYPGNSRCSIGFSVRGGFVTAGHCGSTGTSVSGSAGESGRVAGSVFPGRDMGYVRANSGWTPSPYVNNYRGGRVAVRGSNEASVGASVCRSGSTTGWHCGTIQAKNQTVNYPQGTVRGLTRTTACAEPGDSGGSWLSGNQAQGVTSGGSGNCSWGGTTFFQPVNPILSQWGLSLTTT

SEQ ID NO: 58 - protein, 353 aa, Streptomyces sp.
NDTLTERADAAVAELPAGVLDAMERDLGLSEQEAGLQLVAQYDASLLGETLSADLDAYAGSWLADGTDLVVATTDRAEAAQITEAGAKVEIVDHTLTELESVKAALDEAAESYDTTDAPVWYVDITTNDVVLLTSDTAEAKGFVEAAGVDAGAVSIQTSDEQPQAFYDLVGGDAYYMGGGRCSVGFSVTQGSTPGFATAGHCGTVGTSTTGFNQAAQGTFEESSFPGDDMAWVSVNSNWNTTPTVNDGAVTVSGSTQGAVGASICRSGSTTGWHCGTIEQHNTSVTYPEGTITGVTRTSVCAEPGDSGGSYISGSQAQGVTSGGSGNCTSGGTTYHQPINPLLSAYGLDLVTG

SEQ ID NO: 59 - protein, 353 aa, Actinoalloteichus spitiensis
DTPSPDGADATVASPEMLSAMQRDLGLTEQEALTRVAVEATAVETEDELRASLGPAFGGAHFDGDTNTLVVGVTSAAKADEVRAAGATPEVVAFSADTLDGVVSTLNETSEVPDGVTGWYVDTADNTVVVTTALGSGEAAADFVAESGVNADAVTVVESTEQPRTLYDIIGGDAYYFGGSRCSVGFSVSVGYVTAGHCGGVGTATQGYNRVSSGQVAGSVFPGSDMGYVRTNANWTPRPLVNRYSGGATVTVSGSNEAAVGASICRSGSTTGWRCGTVQAKNQTVFYAQGAVSGLTRTNACAEGGDSGGSWLSGSQAQGVTSGGSGNCTWGGTTYFQPLNPILSRWGLSLTRG

SEQ ID NO: 60 - protein, 338 aa, Byssochlamys verrucosa
FPAAVDVKRAPSSLGITLSQVSNTLIKAVVQNTGRGEVSFIHLNFFKDDAPVKKVAVYRNGSEVQFEGIQRRYKSTGLTRDAFTTLAPGKTAEDVFDIASTCDLISGGPVTIRSEGVVPYATANGIDIAGYIPYSSNELTIDVDGAIASTVSKAIAPLNRRTNISSCSGSEQSTLTMALKNAASLAHAAADAAESGSASKFSEYFKTTASSTRKTVAARLRAVAQEASSSSSGSTTYYCNDAYGYCTTNVLAYTLPSHNTIATCDLYYTNLSALTRTCHAQDQATTSLHEFTHAPGVYSPGTDDLAYGYASSTSLSSSQAVMNADSYALYANAIYVGC

SEQ ID NO: 61 - protein, 339 aa, Hamigera terricola
SPVNVNVGREELPALDVTLSQIGNTQIKAVVKNTGSEDVTFMHLNFFTDSAPVKKVSVFQNNTEVEFQGILRRVKYTDVSTDSVTTLAPGASIEDVFDIATTTDLASGGAVTVKTDGFVPILASAENKVTGYARYTSNELHLDVDGPSAATVSKAIAPLDRRTRLSSCSGSRSSALQTALRNTVSLANAAANAARSGSASKFSEYFKTTSSSVRSTVAARLSAVASEASSTSSGSTTYYCNDPYGYCSTDVLAYTLPSYNIIANCDIYYSYLPALTGSCHAQDQATTTLHEFTHAPGVYSPGTEDYGYGYNAATSLSSSQAVLNADSYALYANAIYLGC

SEQ ID NO: 62 - protein, 334 aa, Aspergillus tamarii
IPVEVPASAPGLDVTLSQVGNTRIKAVVKNTGSEEVTFVHLNFFKDAAPVQKVSLFRNATEVQFQGIKQRLITEGLSDEALTTLAPGATIEDEFDIASTSDLSEGGTITINSNGLVPITTENKVTGYIPFASNELSIDVDAAEAATVSQAVKILDRRTKVTSCSGSRSSALQTALRNTVSLARAAASAAQSGSSSRFQEYFKTTSSSTRSTVAARLNAVANEAASTASGSTTYYCSDVYGYCSSNVLAYTLPAYNIIANCDLYYSYLPALTSTCHAQDQATTTLHEFTHAPGVYSPGTDDLGYGYSAATALSASQALLNADTYALFANAVNLNC

SEQ ID NO: 63 - protein, 334 aa, Aspergillus niveus
LPAKTGEQLQKLDVALSQVDNTLIKAVVKNTGSEDITFVHLNFFRDTAPVKKVSLFRNTTEVPFHGIKQRLRSDGLSADALTVLAPGESIEDEFDIAATSDLSEGGSITISADGFVPIASGNKITGYVPFSSNELSVEVDAAQAASVASAVKPLDRRTKVASCSGSRSSALTQALRNTVSLANAAASAAQSGSSTRFQEYFKTTSSSVRSSVAARFRAVASEASSTSAGSTTYYCTDVYGYCSSNVLAYTLPAYNIIANCDIYYTYLPALTSTCHAQDQATTTLHEFTHAPGVYSPGTDDLGYGYDAATALSSSQALNNADSYALFANAVNLNC

SEQ ID NO: 64 - protein, 372 aa, Penicillium sclerotiorum
IPTGGKKSSFSVDQVAIPATKTKNFADTYARAISKFGGNVPSHVRAAAQQSGAATTTPEANDEEYLTPVNVGGTTLNLDFDTGSADLWVFSEQLPSSEQSGHSVYKPNNGTKLSGATWSISYGDGSSASGDVYKDTVSVGPVKATGQAVEAASKISAQFTRDSNNDGLLGLAFSSINTVKPKAQTTFFDTVKSSLASPLFAVTLKHNAPGTYDFGFVDSSKYTGSLAYTDVDNSQGFWEFTADSYKVGSQSGSSIKGIADTGTTLLLLDDEVVSAYYKQVSGASDSQSAGGYTFDCSADLPDFTVTISGYDAVVPGSLINYAPVSDGSSTCLGGIQSNSGIGFSIFGDIFLKSQYVVFDSNGPRLGFAAQSS

SEQ ID NO: 65 - protein, 371 aa, Penicillium bilaiae
VPTGGKKSFSINQVAIPATKTKNFAGNYAHAIAKYGGNVPSHVEAAAQQSGAATTTPESNDEEYLTPVNVGGTTLNLDFDTGSADLWVFSAELPSAEQSGHALYKPSNGTKLSGASWSISYGDGSSASGDVYKDTVSVGSVKATGQAVEAASKISAQFTKDKNNDGLLGLAFSSINTVKPKAQTTFFDTVKSSLASPLFAVTLKHNAPGTYDFGFIDKSKYTGSLAYADVDNSQGFWEFTADSYSVGSSKGSSIKGIADTGTTLLLLDDEVVSAYYKQVQGAQQDSSAGGYTFDCSSKLPDFTVTISGYDAVVPGDLINFAPASEGSSTCLGGIQSNSGIGFSIFGDIFLKSQYVVFDSNGPRLGFAAQSS

SEQ ID NO: 66 - protein, 373 aa, Penicillium antarticum
SPLVTPRKGFTINQETRAVTKSKTVNLPGVYAQALSKYGATVPQHVHAAAVSGSAVTTPEESDVEYLTPVNVGGTTLNLDFDTGSADLWVFSSELTSSQQSGHSIYKPSSSATKLSGSSWSISYGDGSSASGDVYKDTVTVGGVKATGQAVEAASKISSAFLQDVNNDGLLGLAFSSINTVSPRAQTTFFDTVKSQLDSPLFAVTLKHNAPGSYDFGYIDKSKYTGSLTYANVDDSQGFWSFTASSYKIGTTTGGSITGIADTGTTLLLLPDSVVSAYYKKVSGSQNSNYYGGYVFPCSATLPDFTVTINGYNAVVPGNLINFAQATTGSSTCYGGIQSNSGIGFSIFGDIFLKSQYVVFDSEGPRLGFAAQA

SEQ ID NO: 67 - protein, 370 aa, Penicillium sumatrense
VPTNNVASKFSVNQVSRPATKTTNFAANYGRALSKYGAGVPSHVEAAAAASGSAVTTPESNDVEYLTPVSIGGTTLNLDFDTGSADLWVFSTELSSSEQSGHSVYNPSKSGKKISGASWDISYGDGSGASGDVYTDTVTVGGVTASKQAVEAAKQISSQFQQDTDNDGLLGLAFSSINTVSPTPQKTFFDNVKSSLSQPLFAVALKHNAPGVYDFGFIDSSKHTGSIAYTSVDSSQGFWSFTVDGYKVGSKSGAGFDGIADTGTTLLLLDDSVVSAYYSQVSGAKNDNNAGGYVFDCSADLPDFSVTIGSYTATVPGSLINYGDSGDNSCIGGIQSNSGIGFSIFGDIFLKSQYVVFNANGPKLGFAPQA

SEQ ID NO: 68 - protein, 384 aa, Trichoderma lixii
LPTEGQKTASIEVTYNKNYVAHGPTALFKAKRKYGAPISDNLRAAVAAKHSLTKRQTGSANTNPSDSADDEYITSVSIGTPAQVLPLDFDTGSSDLWVFSSETPKSSASGHVTYSPSKSSTAKKLSGSTWSITYGDHSSSSGDVYTDVVSIGGFSVKTQAIESATKVSTQFVQDTVISGLVGLGFDVGNTVKPRAQKTWFSNAASSLAEPLFTADLRHQETGSYNFGFIDNSLAKGTIGYTPADGSEGYWGFTATGYSVGGAKLGRSSITGIADTGTTLLLLPDNVVDAYYNNVESAQYDDSQEGVVFDCSEDLPSFSFGVGGQTITISGDLLNLTPIEEGSSTCFGGLQSSADIGINIFGDVALKAALVVFDLGNERLGFAQK

SEQ ID NO: 69 - protein, 384 aa, Trichoderma brevicompactum
LPTEGQKTASVEVTYNQNYAAHGPTQLYKAKRKYGAPISDNLKAIVANRKALIKRQTGSAPNHPSDSADDEYITNVSIGTPAQVLPLDFDTGSSDLWVFSSETPKSSASGHTIYTPSKSSTSKKLSGATWSIEYGDKSTSSGDVYTDKVTVGGFSVSTQAVESATKVSAQFVQDTANSGLLGLAFDSINTVSPRQQKTWFSNAANSLAQPLFTANLNHQATGSYNFGFIDTSLASGPINYVPVDNSQGFWGFTASGYSVGGGKLNRSSLSGIADTGTTLLLLPDAVVNAYYANVESAEYDDEQEGVVFDCSEDLPTFSFGVGSGTITIPGDLLNLTPIDSSGQTCYGGLQSSSDIGINIFGDVALKAALVVFDLGNERLGWAQK

SEQ ID NO: 70 - protein, 379 aa, Penicillium cinnamopurpureum
IPTGVPNRKGFTVNQQVRPVTNGTKSKTLNLPAIYANALSKYGVAVPANIKAAAESGTATTTPEDNDIEYLTPVDVGGTTLNLDFDTGSADLWVFSSELPSSESSGHSIYKPSQSGKKLDGYSWKISYGDSSSASGDVYTDTVTVGGVTADGQAVEAAKKISQQFVQDKNNDGLLGLAFSSINTVQPKAQTTFFDTVKDQLDSPLFAVTLKHNAPGSYDFGFIDKSKYTGSLTYADVDKSDGFWAFTADGYSVGSGSSSSSRIKGIADTGTTLLLIDDEIVSAYYKQVDGAQESYSVGGYTFDCSTKLPDFNIKIGDYTAVIPGDVINYAPVQQGSSTCFGGIQSNSGLPFSIFGDIFLKSQYVVFDANGPRLGFAAQA

SEQ ID NO: 71 - protein, 350 aa, Bacillus lichenformis
AQPAKNVEKDYIVGFKSGVKTASVKKDIIKESGGKVDKQFRIINAAKAKLDKEALKEVKNDPDVAYVEEDHVAHALAQTVPYGIPLIKADKVQAQGFKGANVKVAVLDTGIQASHPDLNVVGGASFVAGEAYNTDGNGHGTHVAGTVAALDNTTGVLGVAPSVSLYAVKVLNSSGSGSYSGIVSGIEWATTNGMDVINMSLGGASGSTAMKQAVDNAYARGVVVVAAAGNSGSSGNTNTIGYPAKYDSVIAVGAVDSNSNRASFSSVGAELEVMAPGAGVYSTYPTNTYATLNGTSMASPHVAGAAALILSKHPNLSASQVRNRLSSTATYLGSSFYYGKGLINVEAAAQ

SEQ ID NO: 72 - protein, 360 aa, Bacillus subtilis
FSNMSAQAAGKSSTEKKYIVGFKQTMSAMSSAKKKDVISEKGGKVQKQFKYVNAAAATLDEKAVKELKKDPSVAYVEEDHIAHEYAQSVPYGISQIKAPALHSQGYTGSNVKVAVIDSGIDSSHPDLNVRGGASFVPSETNPYQDGSSHGTHVAGTIAALNNSIGVLGVAPSASLYAVKVLDSTGSGQYSWIINGIEWAISNNMDVINMSLGGPTGSTALKTVVDKAVSSGIVVAAAAGNEGSSGSTSTVGYPAKYPSTIAVGAVNSSNQRASFSSAGSELDVMAPGVSIQSTLPGGTYGAYNGTSMATPHVAGAAALILSKHPTWTNAQVRDRLESTATYLGSSFYYGKGLINVQAAAQ

SEQ ID NO: 73 - protein, 548 aa, Trametes cf versicol
TPTARNLKLHESREEIPAGFSLSGAASPDTTLKLRLALVQSNFAELEDKLYDVSTPSSANYGQHLSKEEVEQLVAPSAESVNAVNAWLTENGLTAQTISPAGDWLAFEVPVSKANELFDADFSVFTHDESGLKAVRTLAYSIPAELQGHLDLVHPTITFPNPNSHLPVVRSPVKPVQNLTSRAVPASCASTITPACLQALYGIPTTKATQSSNKLAVSGFIDQFANSADLKTFLGKFRTDISSSTTFTLQTLDGGSNSQSSSQAGVEANLDIQYTVGLASAVPTIFISVGDDFQDGDLEGFLDIINFLLNESAPPQVLTTSYGQNENTISAKLANQLCNAYAQLGARGTSILFASGDGGVSGSQSSSCSKFVPTFPSGCPFMTSVGATQGINPETAADFSSGGFSNVFARPSYQSTAVSSYLTALGSTNSGKFNTSGRAFPDIATQGVDFEIVVSGRTEGVDGTSCASPTLAAIISLLNDRLIAAGKSPLGFLNPFLYSAAGTAALTDITSGSNPGCNTNGFPAKAGWDPVTGLGTPNFAKLLTAVGL

SEQ ID NO: 74 - protein, 439 aa, Bos taurus
MAKEYFPFTGKIPFEGKDSKNVMAFHYYEPEKVVMGKKMKDWLKFAMAWWHTLGGASADQFGGQTRSYEWDKAECPVQRAKDKMDAGFEIMDKLGIEYFCFHDVDLVEEAPTIAEYEERMKAITDYAQEKMKQFPNIKLLWGTANVFGNKRYANGASTNPDFDVVARAIVQIKNSIDATIKLGGTNYVFWGGREGYMSLLNTDQKREKEHMATMLGMARDYARAKGFKGTFLIEPKPMEPSKHQYDVDTETVIGFLKAHGLDKDFKVNIEVNHATLAGHTFEHELACAVDAGMLGSIDANRGDAQNGWDTDQFPIDNFELTQAMLEIIRNGGLGNGGTNFDAKIRRNSTDLEDLFIAHISGMDAMARALMNAADILENSELPAMKKARYASFDSGIGKDFEDGKLTFEQVYEYGKKVEEPKQTSGKQEKYETIVALHCK

SEQ ID NO: 75 - protein, 591 aa, Saccharomyces cerevisiae
MLCSVIQRQTREVSNTMSLDSYYLGFDLSTQQLKCLAINQDLKIVHSETVEFEKDLPHYHTKKGVYIHGDTIECPVAMWLGALDLVLSKYREAKFPLNKVMAVSGSCQQHGSVYWSSQAESLLEQLNKKPEKDLLHYVSSVAFARQTAPNWQDHSTAKQCQEFEECIGGPEKMAQLTGSRAHFRFTGPQILKIAQLEPEAYEKTKTISLVSNFLTSILVGHLVELEEADACGMNLYDIRERKFMYELLHLIDSSSKDKTIRQKLMRAPMKNLIAGTICKYFIEKYGFNTNCKVSPMTGDNLATICSLPLRKNDVLVSLGTSTTVLLVTDKYHPSPNYHLFIHPTLPNHYMGMICYCNGSLARERIRDELNKERENNYEKTNDWTLFNQAVLDDSESSENELGVYFPLGEIVPSVKAINKRVIFNPKTGMIEREVAKFKDKRHDAKNIVESQALSCRVRISPLLSDSNASSQQRLNEDTIVKFDYDESPLRDYLNKRPERTFFVGGASKNDAIVKKFAQVIGATKGNFRLETPNSCALGGCYKAMWSLLYDSNKIAVPFDKFLNDNFPWHVMESISDVDNENWIAIIPRLSP

SEQ ID NO: 76 - protein, 444 aa, Bacillus subtilis
ETANKSNELTAPSIKSGTILHAWNWSFNTLKHNMKDIHDAGYTAIQTSPINQVKEGNQGDKSMSNWYWLYQPTSYQIGNRYLGTEQEFKEMCAAAEEYGIKVIVDAVINHTTFDYAAISNEVKSIPNWTHGNTQIKNWSDRWDVTQNSLLGLYDWNTQNTQVQSYLKRFLERALNDGADGFRFDAAKHIELPDDGSYGSQFWPNITNTSAEFQYGEILQDSASRDAAYANYMDVTASNYGHSIRSALKNRNLGVSNISHYAYDVSADKLVTWVESHDTYANDDEESTWMSDDDIRLGWAVIASRSGSTPLFFSRPEGGGNGVRFPGKSQIGDRGSALFEDQSITAVNRFHNVMAGQPEELSNPNGNNQIFMNQRGSHGVVLANAGSSSVSINTPTKLPDGRYDNKAGAGSFQVNDGKLTGTINARSVAVLYPDDIEIRCNTFFQ

SEQ ID NO: 77 - protein, 476 aa, Saccharomycopsis fibuligera
QPVTLFKRETNADKWRSQSIYQIVTDRFARTDGDTSASCNTEDRLYCGGSFQGIIKKLDYIKDMGFTAIWISPVVENIPDNTAYGYAYHGYWMKNIYKINENFGTADDLKSLAQELHDRDMLLMVDIVTNHYGSDGSGDSIDYSEYTPFNDQKYFHNYCLISNYDDQAQVQSCWEGDSSVALPDLRTEDSDVASVFNSWVKDFVGNYSIDGLRIDSAKHVDQGFFPDFVSASGVYSVGEVFQGDPAYTCPYQNYIPGVSNYPLYYPTTRFFKTTDSSSSELTQMISSVASSCSDPTLLTNFVENHDNERFASMTSDQSLISNAIAFVLLGDGIPVIYYGQEQGLSGKSDPNNREALWLSGYNKESDYYKLIAKANAARNAAVYQDSSYATSQLSVIFSNDHVIATKRGSVVSVFNNLGSSGSSDVTISNTGYSSGEDLVEVLTCSTVSGSSDLQVSIQGGQPQIFVPAKYASDICS

SEQ ID NO: 78 - protein, 487 aa, Debaryomyces occidentalis
QPIIFDKRDVGSSADKWKDQSIYQIVTDRFARSDGSTTADCLVSDRKYCGGSYKGIIDKLDYIQGMGFTAIWISPVVEQIPDNTAYGYAYHGYWMKNIDELNTNFGTADELKQLASELHSRSMLLMVDVVYNHYAWNGDGSSVDYSSFTPFNQQSYFHDYCLITNYNDQTNVEDCWEGDTEVSLPDLSTEDNEVIGVFQTWVSDFVQNYSIDGLRIDSAKHVDTASLTKFEDASGVYNLGEVYQGDPTYTCPYQSYMKGVTNYPLYYPVYRFFSDTSATSSELTSMISTLQSSCSDVSLLGNFIENHDQVRFPSVTSDTSLIKNAMAFIILGDGIPIIYYGQEQGLNGGSDPANREALWLSGYNTDSEYYELISKLNQIRNQAIKKDSAYSTYKSSVVSSSDHYIATRKGSDANQLISIFNNLGSNGSQDITVSNTGYSSGDKVIDIISCNSVSAGDFGSLSVSISGGMPQVYAPSSVLSGSGICNQ

SEQ ID NO: 79 - protein, 487 aa, Debaryomyces occidentalis
KPIFLSKRDAGSSAAAAWRSESIYQLVTDRFARTDGSTSATCNTGDRVYCGGTFQGIIDKLDYIQGMGFTAIWISPVVEQIPDDTGYGYAYHGYWMKDIYAINSNFGTADDLKNLSNELHKRNMKLMVDIVTNHYAWNGAGSSVAYSNYNPFNQQSYFHDYCLITNYDDQTNVEDCWEGDNTVSLPDLRTEDSDVSSIFNLWVAELVSNYSIDGLRIDSAKHVDESFYPSFQSAAGVYLLGEVYDGDPAYTCPYQNYMSGVTNYPLYYPMLRFFQGTSNSVDELNAMISSLESDCKDITLLGNFIENHDQPRLPSYTSDSALIKNAIAFNLMSDGIPIIYYGQEQGYSGSSDPNNREALWLSGYSTSNGYYKLISSVNQIRNQAIYKDSKYTTYWSDVLYASGHVIALQRGADDQRIVSVFNNLGSSGSQTVTFSTKYSGGEKVVDVLTCQTSYANSDSTLTVSISGGAPRIYAPASLIANSGICNF

SEQ ID NO: 80 - protein, 570 aa, Lipomyces kononenkoae
MCGSTLSASLYVYNDDYDKIVTLYYLTSSGTTGSTLALILPVWSNNWELWTLSAIAAGAVEITGASYVDSDTSVTYTTSLDLPLTTTSASVPTGTAANWRGRSIYQVVTDRFARTDGSITYSCDVTDRVYCGGSYRGIINMLDYIQGMGFTAIWISPIVENIPDDTGYGYAYHGYWMKDIFALNTNFGGADDLIALATELHNRGMYLMVDIVVNHFAFSGNHADVDYSEYFPYSSQDYFHSFCWITDYSNQTNVEECWLGDDSVPLVDVNTQLDTVKSEYQSWVKQLIANYSIDGLRIDTVKHVQMDFWAPFQEAAGIYTVGEVFDGDPSYTCPYQENLDGVLNYPVYYPVVSAFQRVGGSISSLVDMIDTLKSECIDTTLLGSFLENQDNPRFPSYTSDESLIKNAIAFTILSDGIPIIYYGQEQGLNGGNDPYNREALWPTGYSTTSTFYEYIASLNQIRNHAIYIDDTYLTYQNWVIYSDSTTIAMRKGFTGNQIITVLSNLGSSGSSYTLTLSNTGYTASSVVYEILTCTAVTVDLSGNLAVPMSGGLPRVFYPESQLVGSGICSM

SEQ ID NO: 81 - protein, 476 aa, Lipomyces kononenkoae
KTAAEWKELSIYQVITDRFATTNLTAPDCWIRAYCGGTWKGLERKLDYIQNMGFDAVWISPVIHNIEVNTTWGFAFHGYWGDDPYRLNEHFGTAADLKSLSDSLHARGMSLMVDVVINHLASYTLPQDVDYSLYPAPFNTSSAFHQPCPIDFSNQSSIEDCWLVTEPAPALVDLKNEDQVILDALINSVVDLVETYDIDGIRLDTARHVPKPSLAKFQEKVGVFVTGEALNQSVPYVAQYQGPLNSAINYPLWYALVDSFMGRTTFDYLESVVKSEQATFSDAHALTNFLDNQDQPRFASYLGDGNGDDVLRDENAATFLFFVSGIPVIYYGFEQRFDGGFDPVNREPMWTSGYNTSTPLYNYLARLNAIRKYAASITGTQVFYSDDTVFLGSGVSHMAMQRGPLVIVLTNVGQHIIDNTGYTVTGSQFSAGDSLTDLVSCTKVKVVGANGTFTSPSNGGKARIWIKSKYAGKFCS

SEQ ID NO: 82 - protein, 626 aa, Bacillus subtilis
ETANKSNELTAPSIKSGTILHAWNWSFNTLKHNMKDIHDAGYTAIQTSPINQVKEGNQGDKSMSNWYWLYQPTSYQIGNRYLGTEQEFKEMCAAAEEYGIKVIVDAVINHTTSDYAAISNEVKSIPNWTHGNTQIKNWSDRWDVTQNSLLGLYDWNTQNTQVQSYLKRFLDRALNDGADGFRFDAAKHIELPDDGSYGSQFWPNITNTSAEFQYGEILQDSASRDAAYANYMDVTASNYGHSIRSALKNRNLGVSNISHYASDVSADKLVTWVESHDTYANDDEESTWMSDDDIRLGWAVIASRSGSTPLFFSRPEGGGNGVRFPGKSQIGDRGSALFEDQAITAVNRFHNVMAGQPEELSNPNGNNQIFMNQRGSHGVVLANAGSSSVSINTATKLPDGRYDNKAGAGSFQVNDGKLTGTINARSVAVLYPDDIAKAPHVFLENYKTGVTHSFNDQLTITLRADANTTKAVYQINNGPETAFKDGDQFTIGKGDPFGKTYTIMLKGTNSDGVTRTEKYSFVKRDPASAKTIGYQNPNHWSQVNAYIYKHDGSRVIELTGSWPGKPMTKNADGIYTLTLPADTDTTNAKVIFNNGSAQVPGQNQPGFDYVLNGLYNDSGLSGSLPH

SEQ ID NO: 83 - protein, 483 aa, Bacillus subtilis
VNGTLMQYFEWYTPNDGQHWKRLQNDAEHLSDIGITAVWIPPAYKGLSQSDNGYGPYDLYDLGEFQQKGTVRTKYGTKSELQDAIGSLHSRNVQVYGDVVLNHKAGADATEDVTAVEVNPANRNQETSEEYQIKAWTDFRFPGRGNTYSDFKWHWYHFDGADWDESRKISRIFKFRGEGKAWDWEVSSENGNYDYLMYADVDYDNPDVVAETKKWGNWYANELSLDGFRIDAAKHIKFSFLRDWVQAVRQATGKEMFTVAEYWQNNAGKLENYLNKTSFNQSVFDVPLHFNLQAASSQGGGYDMRRLLDGTVVSRHPEKAVTFVENHDTQPGQSLESTVQTWFKPLAYAFILTRESGYPQVFYGDMYGTKGTSPKEIPSLKDNIEPILKARKEYAYGPQHDYIDHPDVIGWTREGDSSAAKSGLAALITDGPGGSKRMYAGLKNAGETWYDITGNRSDTVKIGSDGWGEFHVNDGSVSIYVQK

SEQ ID NO: 84 - protein, 589 aa, Bacillus subtilis
MMEYAAIHHQPFSTDAYSYDGRTVHIKIRTKKGDADHIRFIWGDPYEYNDGKWSANEQPMRKIAATEMHDYWFAEVVPPFRRLQYAFVVTDDHEDIFFGSSGVCPYNEKTLETIHYYFKFPFVHEADTFQAPEWVKSTVWYQIFPERFANGREDLSPKNALPWGSKDPGVNDFFGGDLQGIVDKLDYLEDLGVNGIYLTPIFSAPSNHKYDTLDYFSIDPHFGDPEIFRTLVSQLHQRGMRIMLDAVFNHIGSASPQWQDVVKNGDQSRYKDWFHIHSFPVTDDNYDRFAFTADMPKLNTANPEVQKYLLDIALYWIREFDIDGWRLDVANEVDHVFWKTFRQAVSTEKPDVYILGEIWHSAEPWLRGDEFHAAMNYPFTEPMIEYFADQTISASRMAHRVNAHLMNGMKQANEVMFNLLDSHDTKRLLTRCRNDEKKARALLAFMFAQTGSPCIYYGTEIGLDGENDPLCRKCMVWEKEKQNQDMLQFMKRLIALRKQENTLLTEGHLEWNLLDDKNDFISFSRTLDEKILIYFFNQGNVVQHISLRELNIDRNNKICDAWTEQPLHYHDVIAVQPGEFLILSAAAPV

SEQ ID NO: 85 - protein, 483 aa, Bacillus lichenformis
ANLNGTLMQYFEWYMPNDGQHWKRLQNDSAYLAEHGITAVWIPPAYKGTSQADVGYGAYDLYDLGEFHQKGTVRTKYGTKGELQSAIKSLHSRDINVYGDVVINHKGGADATEDVTAVEVDPADRNRVISGEHLIKAWTHFHFPGRGSTYSDFKWHWYHFDGTDWDESRKLNRIYKFQGKAWDWEVSNENGNYDYLMYADIDYDHPDVAAEIKRWGTWYANELQLDGFRLDAVKHIKFSFLRDWVNHVREKTGKEMFTVAEYWQNDLGALENYLNKTNFNHSVFDVPLHYQFHAASTQGGGYDMRKLLNGTVVSKHPLKSVTFVDNHDTQPGQSLESTVQTWFKPLAYAFILTRESGYPQVFYGDMYGTKGDSQREIPALKHKIEPILKARKQYAYGAQHDYFDHHDIVGWTREGDSSVANSGLAALITDGPGGAKRMYVGRQNAGETWHDITGNRSEPVVINSEGWGEFHVNGGSVSIYVQR

SEQ ID NO: 86 - protein, 478 aa, Aspergillus niger
ATPADWRSQSIYFLLTDRFARTDGSTTATCNTADQKYCGGTWQGIIDKLDYIQGMGFTAIWITPVTAQLPQTTAYGDAYHGYWQQDIYSLNENYGTADDLKALSSALHERGMYLMVDVVANHMGYDGAGSSVDYSVFKPFSSQDYFHPFCFIQNYEDQTQVEDCWLGDNTVSLPDLDTTKDVVKNEWYDWVGSLVSNYSIDGLRIDTVKHVQKDFWPGYNKAAGVYCIGEVLDGDPAYTCPYQNVMDGVLNYPIYYPLLNAFKSTSGSMDDLYNMINTVKSDCPDSTLLGTFVENHDNPRFASYTNDIALAKNVAAFIILNDGIPIIYAGQEQHYAGGNDPANREATWLSGYPTDSELYKLIASRNAIRNYAISKDTGFVTYKNWPIYKDDTTIPMRKGTDGSQIVTILSNKGASGDSYTLSLSGAGYTAGQQLTEVIGCTTVTVGSDGNVPVPMAGGLPRVLYPTEKLAGSKICSSS

SEQ ID NO: 87 - protein, 477 aa, Aspergillus niger
ATPADWRSQSIYFLLTDRFARTDGSTTATCNTADQKYCGGTWQGIIDKLDYIQGMGFTAIWITPVTAQLPQTTAYGDAYHGYWQQDIYSLNENYGTADDLKALSSALHERGMYLMVDVVANHMGYDGAGSSVDYSVFKPFSSQDYFHPFCFIQNYEDQTQVEDCWLGDNTVSLPDLDTTKDVVKNEWYDWVGSLVSNYSIDGLRIDTVKHVQKDFWPGYNKAAGVYCIGEVLDGDPAYTCPYQNVMDGVLNYPIYYPLLNAFKSTSGSMDDLYNMINTVKSDCPDSTLLGTFVENHDNPRFASYTNDIALAKNVAAFIILNDGIPIIYAGQEQHYAGGNDPANREATWLSGYPTDSELYKLIASRNAIRNYAISKDTGFVTYKNWPIYKDDTTIPMRKGTDGSQIVTILSNKGASGDSYTLSLSGAGYTAGQQLTEVIGCTTVTVGSDGNVPVPMAGGLPRVLYPTEKLAGSKICYG

SEQ ID NO: 88 - protein, 431 aa, Streptomyces avermitilis
SPPGTKDVTAVLFEWKFDSVARECTNTLGPAGYGYVQVSPPAEHIQGSQWWTSYQPVSYKIAGRLGDATAFQNMINTCHTAGVKVVVDTVVNHMSAGSGTGTGGSAYTKYNYPGLYSSYDMDDCTATITDYTNRANVQNCELVGLADLDTGEEYVRKTIAGYMNTLLGYGADGFRVDAVKHIPAADLANIKSRLTNPSVYWKQEVIYASGEAVQPTEYTGNGDVQEFRYAYDLKRVFNNENLAYLKNYGEGWGYLNSSVAGVFVDNHDTERNGSTLNYKDGANYTLANVFMLAYPYGAPDINSGYEWSDADAGPPGGGTVNACWQDGWKCQHAWPEIKAMVAFRNATRGESVTNWWDNGGDAIAFGRGAKGYVAINHESGSLTRTYQTSLTAGTYCNVQNNTGVTVDSSGRFTATLGANTALALYSGKSTC

SEQ ID NO: 89 - protein, 643 aa, Clostridium phytofermentans
MYTLKSKLRDLYRHPVGYDVINKILLQAGLSKGLIENPVIGALPLSFLNRIAGKKLGNGFFDALLALLNQSNDRLDPYSSKDKKITPTWWKEAVFYQIYPRSFMDGNGDGVGDLPGIISKLDYLKELGVDALWLSPIYDSPGDDNGYDIRDYQKIDSQFGTMEDFDLLLTELHARNMRLVMDLVVNHTSDEHHWFKEALKSSESTYRDYYFLRKEPNNWTSFFSGSAWNHYPEEDLWGLHLFSKKQMDLNWENPKLRQDIYQMIRWWLEKGVDGFRLDVINYISKETGLPDGDSFIGNLMGFTGIEHYFYGPKLHNHLQEIQKEAFTPYQAFSVGETPGIGMKMGKLLTDDSRGELNMMFSFDHLETSGHARFDQYEYDLNYYKSYIMDWMENFADTSWMSLFYDNHDNPRMLSKVDHTHTHRQELAKMLAMIQMTLKGTPFLYQGQELGMINKDFHEISNFRDVESINKYKELCEKMPKEEAFLQILAGSRDHARTPMQWSAKPGCGFSNAVPWIDSDGDELVCNAEIQMQDSESVLSFYRDLIALRRKTPALIYGDIEFTHKKRKDILIYTRYLEGETYLIICNLSNDEQKLPGNVPVSESLEGLESLSASADERKGLVLCNYPAKVMKSLRAYEGRVYRI

SEQ ID NO: 90 - protein, 1016 aa, Clostridium phytofermentans
ATDTITIHYHRDDGDYEKWNLWLWAEGKDGAAYYFDGEDAFGPYVSVSLDKSADRIGFIVRTDSWEKDVSEDRFIDTSLGDEIWISSGESTFSYEAPEGYEKEVSIESFQLKLNYLRYDEEYTDISFRLTFEDGTTDFLTKEHMRIENGILKAEKEVKYGKKITLDVLKNGLEEDYQGVSFSTAKIDEESKLEMYWMQGTGTISPKADFIKRSKEIESALITSMKEITVKLSVPCRVDDIKQDGFKLSPKLAVSKVEATSTRDSEYKTIKEGYADTFIITMEEPLDMSKKYALSKTDYGSRNLTLDSGLYTSEEFEAAYTYEGNDLGATYSKEKTVFKVWSPSAESISVLFYPHGEAKDGEKPEITYPMKQTGAGVWQAEIEGDLKNKYYVYQVTVDGKTKLVVDPYAKAAGVNGERGMVIDLSETDPDGFREHSSPEFKNPVDAVIYEIHVRDLSMNENSGIENKGKFLGFTETGTTNSAGLSTGLDHMKELGVTHVHLLPSFDYKTIDESKLGENKFNWGYDPQNYNLPEGSYTTDPYQGEVRVREYKEMVQALHENGLHVVMDVVYNHTYTAGDSNFTSLVPGYYYRTDINGNFTNGSGCGNETASERAMVRKFIVDSVVYWATEYKVDGFRFDLMGLHDIETMNMVREALDKIDPSILLYGEGWTGGSTPLPDSKQAIKNNAVELNERIACFSDDIRDAIKGSVFDASDTGFINSGKRNVSNRDESIKFGIVASVSHPQVNLSGVPYSSRFWANEPSQTINYASAHDNLTLWDKLLETNKMASKEELVQMNKLSAAIVLTSQGIPFFQAGEEMARTKKGNDNSYQSPDSINMLNWDNKTEYKDLFEYYKGLIALRKTYDAFRMQTAEEIQQKLEFVDSDSSVIAYRIHDAVKDGREIALIFNGTLEEKEVVLSANAWDVLVNQDTAGTDVIETITGGTIKVPAKSTLVLLENKDAVIKGDKDAVKGDEIQELPTNMQEVAEKESGNAWLWVGIATVCVLAGGVLFWILKRKR

SEQ ID NO: 91 - protein, 554 aa, Clostridium phytofermentans
MKNTNTLHPWWESAAAYQIYPRSFMDSNGDGVGDLQGIISRLPYLSELGFDLIWICPIYPSPNDDNGYDISDYQNIQKEYGTMEDFEELLHKAHERGIRVIMDLVVNHTSSSHPWFIESRSSKDNPKRDWYIWKDGKDNVEPNNWESIFGGSTWEYDEKSGQYFLHVFGKTMPDINWENTQVKKAIFDMICWWLDKGIDGFRVDAISHIKKPDFNDMPNPKNERYVSSFDKHMNQSGILDLLNELKENAFSKYDIFTVAEANGVRIEEIEEWVSSEKGIFNSLFQFDHLNLWNVGSEEGKISIKKLKNALTKWQKAAPMDGNVALVMENHDLVRSISRFGSEDKYWKESAKCLALMYYMQKGVPFIYQGQEIGMLNADYESHLDFRDDPTLFAYQDRINNGMSPAESLQVLKKSSRDNSRTPMQWDASPHAGFTTGTPWMKVNQNYHWLNAEVQKEDEDSILNFYKKLIKIKKETTGLIYGDYKLLMEESESIYAYTREYEEKNYLVVCNLSEELSELQIDLDITKGEILISNYEDRNSKEMLLKPYECRLYSL

SEQ ID NO: 92 - protein, 538 aa, Clostridium phytofermentans
MVKKWWHSSVVYQIYPRSFNDSNGDGIGDLKGIIEKLDYLKNLGIDVIWLSPVFKSPNDDNGYDISDYEDIMDEFGTLEDMELLLKEANNRGIKILMDLVANHTSDEHKWFIESRKSKDNAYRDYYIWRDPVDGHEPNDLGSTFSGSAWEWDEATGQYYLHLFSKKQPDLNWENPIVREEVWKSMNFWIDKGIGGFRMDVIELLGKIPDEKIISNGPMLHEYIREMNRNSFGDKDLLTVGECWGATPEIAKMYSNPDGSELSMVFQFEHIGLDQIPGKDKWDLQPLNLIDLKNVFHKWQTCFHDDGWNSLFWNNHDTPRIVSRWGNDKVYKIESAKMLATLLHGLKGTPYIYQGEELGMANIKFKDINQYKDIETLNMYKDRLNKGYKHEDIMESIYAKGRDNARTPMQWSDEIDGGFTTGTPWIEVNPNFTEINAKEQVSNPNSIYNYYKKLIEIRKNNEVIVYGDFEMLLPEDKNIFAYVRTLKDSKIVVVCNFYENEVEYNIPKEYEEKKEVLISNYGLSLTGRLRPFEAIMYRV

SEQ ID NO: 93 - protein, 555 aa, Clostridium phytofermentans
CKKADVNQNPSELNQDESQKEKEENDDEGTPEVSQDETKAVIPYDYVQNLNIIDDNYRNFYEIFVYSFYDSNGDGIGDINGVISKLDYINDGNDATDSDLGFNGIWLMPIMPSTTYHKYDVTDYYNIDPQYGTLEDFKNLVSECHKRGIHLIIDFVFNHTSAKHPWFLEAVSYLESLKEGEEPDLEKCPYVGYYHFTKDYNGSKTYYKAGTSNWYYEGVFWDQMPDLALENENVRKEIEDIAKYWLDLGVDGFRLDAAKEYFSGEKERNIEVLKWFSDYVKSVKEDADIVAEVWDEEGTIAAYYESGIPSLFNFPLSQHNGLITNTARKLGTSSGKNFAKTLLRLDEKYKEGNPKYIDAPFISNHDTTRISAQCVNDEDQMKMSAGMLLTMNGSPYVYYGEEIGMNSKGTKDENKRLPMQWSATDTTGITTPPANADSVEQKFPPVDEQMKDPLSLYNYYKRAVRIRNENPEIARGDMSVIEELCTKDISAIKKVYQGSEIVILYNINTESANILLKDAGLTELNIRGYLSVDGNAVTMSDGVVSMPKYSIVILK

SEQ ID NO: 94 - protein, 583 aa, Clostridium phytofermentans
MKFEAIYHRTSDNYCYPLNEEDLIINIKTGHDIERVFIYYGDPFEGGILGGNWTWNGVEEELIYKKNLTHHIWWTTTVKPKFKRCKYYFKLVANDTSYYYFEDGFYTEAEMNHQDKNLVYFTFPWMNSIDINKTPDWVNDTVWYQIFPERFNNGDKENDPKNVKAWGFHTVSNDEFYGGDLQGIINRLDYLADIGISGIYLTPIFEANTSHKYDTKDYMKIDPHFGDEKVFKNLVDTAHEKGIRIMLDGVFNHCGNQFAPWLDVLKNGPDSKYFNWFMINKWPFNKEDHNTNDGSFYSFAFTSRMPKLNTNNPEVIKYLLDVVEYWVKNFDIDGIRLDVANEISHRFCKDLRKLTKELKPDFYILGELWHDAITWLHGDEFDGVMNYPLATSLADYWVYPEKTNYDFECAINHNFTMYMQQTNDVLFNLLDSHDTNRLIDKVKDIDIFYQQLAVLFTMPGSPCIYYGTEIAMEGSYDPDCRRCMPWEDIDAGLFKDRIEIIKALIHLRKTNNAFKSRHYHFIEDKNNNRVIHYIKTDEDHKQVEVILNCSKDSIVVQRKGNELFSLLNEDTILKPKGVFIQQI

SEQ ID NO: 95 - protein, 575 aa, Clostridium thermocellum
MKLEAIYHKPYSEFAFPVAPDTLVIRLRTAKNDVNTCILIYHEKYDTSQRGKVKMDKVASDGMFDYYEVELNVGIKRIKYMFYLEDNYSIKWYSSDGFFDYMPQWGHFTYSYICKDDIFHEVEWFRNSTIYQIFPDRFAKFPPDTENSGKRTIHGGNIKGIIDRFDHLVKLGVDVVYLNPIFKSESYHRYDVVDYYEIDPMFGSKEELRELMDLCHKNGIKVIFDGVFNHSGDKFFAFRDVVEKGEKSKYANWYFINSFPVQGYPRPNYECFSFYGGMPKLNTGNPETAKYFLDVVKYWTVEFGVDGWRLDAADEVDRKFWRKLRDMLKDLNKDVVLIGEIFDEASSWLWGDQFDSVINYPLKAMINDLFAYRSIDVETFRNRISGYIMKFNKKVLSSLVNIISTHDTPRFLTLCNGDEKRFEMAVVFQFTFPGVPLIYYGDEIGMEGEGDPDCRRPMIWDEAKWNKKTLELYKFLIGLRKRFDALRTGEYGELPVTGCNGILAYRRGRGENGIIVAMNTLDRKENVVVETGDSFDTVKAFESLKDEERLNVDKKRINICLNPFEWRIYKACGEL

SEQ ID NO: 96 - protein, 655 aa, Thermobifida fusca
MIGRFPILDVSPVVDIGTAKAVVGETFPVRATVFREGHEALGAGVVLYTPEGQRQPLVPLREIAPGTDRYEAEVTVTSEGLWHFAIEAWSDPYATWCHDARIKIPAGQDVELMLEEGARLLERAARRVPRRPALAEIAAAMRDGSRSAHERLDLALSDLVRDELAERPLRELVTRSQRFPVMVSRRRALFGSWYEFFPRSEGAVLDTEDGEPRSGTFATAARRLPAIADMGFDVVYIPPIHPVGYSFRKGRNNSTVAQPGDPGSVWAIGSHEGGHDAIHPDLGTIDDFDAFVARARELGLEIAMDLALQASPDHPWVKEHPEWFTVRADGSIAYAENPPKKYQDIYPINFDKDPEGIFTEVRRIVRYWMSHGVRIFRVDNPHTKPVAFWERLLADIAATDPDVIFLSEAFTRPAMMHTLAKIGFHQSYTYFTWRNTKQELEEYLTELTGEAAAYMRPNFFVNTPDILHAYLQHGGRPAFEVRAILAATLSPTWGMYSGYELCENRALKPGSEEYLDSEKYQYKPRDWEAAEAAGITITPLIRKLNSLRRSHPALQELRNLRFHYADQPEIICYSKRLAGANHGADDTILVVANLDPHHTREATVWLDMPALGFAPGDHITVTDQLSGHSYHWVEANYVRLDPHVQTAHIFTVAPA

SEQ ID NO: 97 - protein, 572 aa, Thermobifida fusca
APSGNRDVIVHLFQWRWKSIADECRTTLGPHGFGAVQVSPPQEHVVLPAEDYPWWQDYQPVSYKLDQTRRGSRADFIDMVNTCREAGVKIYVDAVINHMTGTGSAGAGPGSAGSSYSKYDYPGIYQSQDFNDCRRDITNWNDKWEVQHCELVGLADLKTSSPYVQDRIAAYLNELIDLGVAGFRIDAAKHIPEGDLQAILSRLKNVHPAWGGGKPYIFQEVIADSTISTGSYTHLGSVTEFQYHRDISHAFANGNIAHLTGLGSGLTPSDKAVVFVVNHDTQRYEPILTHTDGARYDLAQKFMLAHPYGTPKVMSSYTWSGDDKAGPPMHSDGTTRPTDCSADRWLCEHRAVAGMVGFHNAVAGQGIGSAVTDGNGRLAFARGSAGYAAFNATNTAWTRTFTTSLPDGVYCDVANGTFVDGVCDGPSYQVSGGKFTATVPANGAVALHVEAPGSCGPDGCGTPPGGGDDCTTVTARFHATVTTWYGQEVAVVGSIPELGSWQPAQGVRLRTDSGTYPVWSGAVDLPAGVGFEYKYVKLNPDGTVEWEQGGNRIATVDDSGGGCSQNFYDSWR

SEQ ID NO: 98 - protein, 825 aa, Anaerocellum thermophilum
MLVRAYIDDFNEIVVVLSQMVHSVKKEDFKVFLNEEEIDIEKIDKIIPHSDNPAEAETRGYEICEQKGKIRFVLKEGHFDYHRKPYKKPVFVIGEMNDWQISPEWEMTYSKLRGRYELIKDLKEIKIGQKFKFAEGASQKLWYPPGFGNDIVITEYFDRETAFTNMIRIIPSNRLLPNLKYKVVYKSEHIWARPREILTRPEFFYPGELGIKYEPYGTYFKLWAPTAYKVKVKVFDESENFRFEKEMARSENGTWNIYLTGDLKNHYYLYEVWHYNYDEDEGFIVYEVPDPYSKASSSNSQKSFIFDPADTLIEGWQQDEFVKTIEKQQDAIIYEMHVRDFTIDKNSGVDEKFRGKFLGLCQKSFYKEKFSTGLLHLKELGITHIHLLPISDFGSVDDKNPDKKYNWGYDPVLYQCPEYWYSTKSGGIEALKELKTMIKTLHQNGIGVVMDVVFNHTYHTKGGKFSIFDKIVPGYFYRIDDYGDYSNATGCGNEIATEKPMVRKFILDTIIYWTEDFHIDGFRFDLMGLIDTLTMRMIAKEVRKRNPYALIYGEGWVMGDSMCLLEERATIESTAHHGYSIGLFNDRIRDSIRGDLDGFKTGYMHGNLSDIERLKQGIRAAIDDFAKEPDECVNYVSCHDNLTLFDKAQKTMVGEDIFWIDRVCRLANAIILTSQGIPFLHGGVEFNRSKGGHPNTYNAGDNINKIDWSLKEKFYDTFKFYCDLIKLRKEHVAFRMRSSGEIRKYLKFLPAPDGIVAFLISYPYDAWKKIIVAYNPFKEKKVITLPEGVWKIKANDGIIFSEENELEAIGSFEISPVSLFIAYQK

SEQ ID NO: 99 - protein, 1104 aa, Anaerocellum thermophilum
DEKTTLIIHYYRYNEDYQGWNLWIWPVEPVGAEGKAYEFTSKDDFGVKAVVELPGKVTKVGIIVRKGNWEAKDVAVDRFISGISGSKEVWLIEGEEQIYTSQPQKTPKMTAFIDGLNTIVVKLAKKADILSNNRTQGFKVTAFYEEVPIKKVEPVLPKINKNFKPEEAGYELIDGGTKVKFILKPGAGDFKFTDTSGKLDVYVSGTMNDWGGTASSEGKYKPLPAWKMTWNAEKGYYELVKELGKDGVVIGAKFKFTSWDGTSAKWYPDGMGNDKVIEELYTGNEKITKVDTFKITTEDELEPQVPYVVSKDSFKPTVAQARNILDNPKYYYKGNDLGCTYTKAYSAFRLWAPTAIGVILRLYDDYKTTKYKEYEMQQSFNGTWYLKINGDLKGKYYQYEVWHASNSITDDTIRKYVVPDPYSRATSANSERTLIFDPKDTNPVGWEKDTFVTLKNQEDAIIYETHVRDFTIDASSGVRPEFRGKYLGFTQTGAKGPNGVKTGIDHLKELGITHVHLLPTYDFGSIDETNPDKGYNWGYDPVLYQNVEGSYATNPNTIVRIKEYKQMVMALHKAGIGIIQDVVFNHTFQIGDAKFSIFDKIVPGYFYRKDKDGNYSNASGCGNEIATEKPMVRKFIIDTLTYLTKEYHIDGFRFDLMAAIDRVTMAKAQEEVRKINPSAVIYGEGWLAGSTPLDSSLRMEIGSFNQAGLHIGLFNDRIREAIRGNLDNESKGFMQGNYSFRLEDLKRGIQGGLGDFAADPDECINYVSAHDNLTLWDKLQKSVPNEPDYIKDKMGRLANAIVLTAQGVPFLHGGVEFNRTKYMNHNSYNAGDKINKYNWNLKVKWYNTFKYYQGLIALRKAHPAFRMTTAEDIQKYLTFIQTPKGTLGFRLTYPKDTWNDIIVVYNSTKKVQEVTLPEGNWVVVANGDEVGTTPIKNLTNFVAGKALVAPISMFVAYKSNEFPQGFTKVTGKDPVSLESSSTVTVPKVYGNGNIEVTFKVKVPHGTDDDVIYLAGSFGKAGLSDWNPGDKDGAIELVRLQDGTYTVTVKLNAGETFEYKYTRGSWTTVEKGANKEEIENRKLTVKDEGGGKMIVSDTVLNWADK

SEQ ID NO: 100 - protein, 611 aa, Anaerocellum thermophilum
MRKPHIIEAIIGNTKVLGQLDSNGILQRFYWPAVDYYQQLKLFLAAVFLDGLVFFEDENFKIKSGFVDDFVYFFEYKIADKTIFQLDFVDFETDSLVRLWETGFEDFYVFLEPMINSSSLFNAAKVDKENEIVYAYFKGTYIGLAFENKIKSFTVKNGIDDANDNQLEGWNEATNPQIAVKLKNTGKVVCFLAFGNSKDEIYQKLSYLKQKGYDEVYRQNKAFWEKKFSKVKLICTQDPKDMQLQKRSAYVFYVLQNSKTGGILAASEVDEKFFHCGGYGFVWGRDAAFIVSAMDELGLSREVEKFFGFKFSCQEKEGFWDQRYYTDGSLAPSWGIQIDETASVVWGFLEHCEKQNSLHLIDLHKEQLKKALLFLIAAVDSEKGVIFRSFDLWEEREGIHLYSNASIYAALKKAKKYFPELESEIEKKLKAIKNQMATRFYSPKLSRYVRSTDVRIPHEEFLKLPEENRYMQKDERYEITYYFKKQDEVVDISMLGIYYPFEMVDSSDKAFKATILAIERECQNSIVGGYKRYSDDRYIGGNPWILTTLWLAIYYKKTGQIDRAEKLFEWAKAHSLPNGLFPEQVDRITGKPAWVVPLAWSHAMYVLYLYE

SEQ ID NO: 101 - protein, 529 aa, Streptomyces avermitilis
MTSFRPAPAWLADAVFYQIYPQSFADSDGDGIGDFNGIVQRLDHLVWLGVTAVWLNPCFVSPFRDAGYDVSDYLNVAPRYGSADDLAELVDEAGRRGIRVLLDLVAGHTSDEHPWFTASANDPDDHRYIWAPEGRPDGFVTSPGTRPGAYLPNFFDTQPALNFGYGRKNPAEPWRQPVDAAGPRANREALRTIMDHWLGLGLAGFRVDMAASLVKDDPGRTETARIWTELRHWLDTAHPDAVLLSEWGEPEVSVPAGFHTDFFLQFGGATDGLPLRSLWSNGDGTVNEAWDPLDCFFDASGKGSPRPFVEAWRKASDAVGATGFVSLPTANHDFSRLNCGPRTAEQLPAAFAFQLTWPTLPAIYYGDEIGMRYVGGLPDKEGSVLGPRYNRAGSRTPMQWDDGPGAGFSTAPADRLYLPLDPSPDRPTVAAQRADDGSLLHLVRRLVALRASTPALGSGGSVEVLHTGYPFVYVRGGRYLVVVNPQRNEVRCPYDATREARALEASGVRVGNGTIEAEGFSYGVFDLGR

SEQ ID NO: 102 - protein, 431 aa, Streptomyces avermitilis; identical to SEQ ID NO: 88

SEQ ID NO: 103 - protein, 503 aa, Saccharomycopsis fibuligera
LPLQEGPLNKRAYPSFEAYSNYKVDRTDLETFLDKQKDVSLYYLLQNIAYPEGQFNDGVPGTVIASPSTSNPDYYYQWTRDSAITFLTVLSELEDNNFNTTLAKAVEYYINTSYNLQRTSNPSGSFDDENHKGLGEPKFNTDGSAYTGAWGRPQNDGPALRAYAISRYLNDVNSLNKGKLVLTDSGDINFSSTEDIYKNIIKPDLEYVIGYWDSTGFDLWEENQGRHFFTSLVQQKALAYAVDIAKSFDDGDFANTLSSTASTLESYLSGSDGGFVNTDVNHIVENPDLLQQNSRQGLDSATYIGPLLTHDIGESSSTPFDVDNEYVLQSYYLLLEDNKDRYSVNSAYSAGAAIGRYPEDVYNGDGSSEGNPWFLATAYAAQVPYKLVYDAKSASNDITINKINYDFFNKYIVDLSTINSGYQSSDSVTIKSGSDEFNTVADNLVTFGDSFLQVILDHINDDGSLNEQLNRNTGYSTSAYSLTWSSGALLEAIRLRNKVKALA

SEQ ID NO: 104 - protein, 497 aa, Saccharomycopsis fibuligera
VPVELDKRNTGHFQAYSGYTVARSNFTQWIHEQPAVSWYYLLQNIDYPEGQFKSAKPGVVVASPSTSEPDYFYQWTRDTAITFLSLIAEVEDHSFSNTTLAKVVEYYISNTYTLQRVSNPSGNFDSPNHDGLGEPKFNVDDTAYTASWGRPQNDGPALRAYAISRYLNAVAKHNNGKLLLAGQNGIPYSSASDIYWKIIKPDLQHVSTHWSTSGFDLWEENQGTHFFTALVQLKALSYGIPLSKTYNDPGFTSWLEKQKDALNSYINSSGFVNSGKKHIVESPQLSSRGGLDSATYIAALITHDIGDDDTYTPFNVDNSYVLNSLYYLLVDNKNRYKINGNYKAGAAVGRYPEDVYNGVGTSEGNPWQLATAYAGQTFYTLAYNSLKNKKNLVIEKLNYDLYNSFIADLSKIDSSYASKDSLTLTYGSDNYKNVIKSLLQFGDSFLKVLLDHIDDNGQLTEEINRYTGFQAGAVSLTWSSGSLLSANRARNKLIELL

SEQ ID NO: 105 - protein, 747 aa, Saccharomyces cerevisiae
FPTALVPRGSSSSNITSSGPSSTPFSSATESFSTGTTVTPSSSKYPGSKTETSVSSTTETTIVPTTTTTSVITPSTTTITTTVCSTGTNSAGETTSGCSPKTITTTVPCSTSPSETASESTTTSPTTPVTTVVSTTVVTTEYASTSTKQGGEITTTFVTKNIPTTYLTTIAPTSSVTTVTNFTPTTITTTVCSTGTNSAGETTSGCSPKTVTTTVPCSTGTGEYTTEATAPVTTAVTTTVVTTESSTGTNSAGKTTTSYTTKSVPTTYVFDFGKGILDQSCGGVFSNNGSSQVQLRDVVLMNGTVVYDSNGAWDSSPLEEWLQRQKKVSIERIFENIGPSAVYPSILPGVVIASPSQTHPDYFYQWIRDSALTINSIVSHSADPAIETLLQYLNVSFHLQRTNNTLGAGIGYTNDTVALGDPKWNVDNTAFTEPWGRPQNDGPALRSIAILKIIDYIKQSGTDLGAKYPFQSTADIFDDIVRWDLRFIIDHWNSSGFDLWEEVNGMHFFTLLVQLSAVDRSLSYFNASERSSPFVEELRQTRRDISKFLVDPANGFINGKYNYIVETPMIADTLRSGLDISTLLAANTVHDAPSASHLPFDIDDPAVLNTLHHLMLHMRSIYPINDSSKNATGIALGRYPEDVYDGYGVGEGNPWVLATCAASTTLYQLIYRHISEQHDLVVPMNNDCSNAFWSELVFSNLTTLGNDEGYLILEFNTPAFNQTIQKIFQLADSFLVKLKATWEQTGN

SEQ ID NO: 106 - protein, 621 aa, Aspergillus niger
NVISKRATWDSWLSNEATVARTAILNNIGADGAWVSGADSGIVVASPSTDNPDYFYTWTRDSGLVLKTLVDLFRNGDTSLLSTIENYISAQAIVQGISNPSGDLSSGAGLGEPKFNVDETAYTGSWGRPQRDGPALRATAMIGFGQWLLDNGYTSTATDIVWPLVRNDLSYVAQYWNQTGYDLWEVNGSSFFTIAVQHRALVEGSAFATAVGSSCSWCDSQAPEILCYLQSFWTGSFILANFDSSRSAKDANTLLLGSIHTFDPEAACDDSTFQPCSPRALANHKEVVDSFRSIYTLNDGLSDSEAVAVGRYPEDTYYNGNPWFLCTLAAAEQLYDALYQWDKQGSLEVTDVSLDFFKALYSDATGTYSSSSSTYSSIVDAVKTFADGFVSIVETHAASNGSMSEQYDKSDGEQLSARDLTWSYAALLTANNRRNVVPSASWGETSASSVPGTCAATSAIGTYSSVTVTSWPSIVATGGTTTTATPTGSGSVTSTSKTTATASKTSTSTSSTSCTTPTAVAVTFDLTATTTYGENIYLVGSISQLGDWETSDGIALSADKYTSSDPLWYVTVTLPAGESFEYKFIRIESDDSVEWESDPNREYTVPQACGTSTATVTDTWR

SEQ ID NO: 107 - protein, 593 aa, Aspergillus oryzae
VQPVLRQATGLDTWLSTEANFSRQAILNNIGADGQSAQGASPGVVIASPSKSDPDYFYTWTRDSGLVMKTLVDLFRGGDADLLPIIEEFISSQARIQGISNPSGALSSGGLGEPKFNVDETAFTGAWGRPQRDGPALRATAMISFGEWLVENSHTSIATDLVWPVVRNDLSYVAQYWSQSGFDLWEEVQGTSFFTVAVSHRALVEGSSFAKTVGSSCPYCDSQAPQVRCYLQSFWTGSYIQANFGGGRSGKDINTVLGSIHTFDPQATCDDATFQPCSARALANHKVVTDSFRSIYAINSGRAENQAVAVGRYPEDSYYNGNPWFLTTLAAAEQLYDALYQWDKIGSLAITDVSLPFFKALYSSAATGTYASSTTVYKDIVSAVKAYADGYVQIVQTYAASTGSMAEQYTKTDGSQTSARDLTWSYAALLTANNRRNAVVPAPWGETAATSIPSACSTTSASGTYSSVVITSWPTISGYPGAPDSPCQVPTTVSVTFAVKATTVYGESIKIVGSISQLGSWNPSSATALNADSYTTDNPLWTGTINLPAGQSFEYKFIRVQNGAVTWESDPNRKYTVPSTCGVKSAVQSDVWR

SEQ ID NO: 108 - protein, 579 aa, Rhizopus oryzae
ASIPSSASVQLDSYNYDGSTFSGKIYVKNIAYSKKVTVIYADGSDNWNNNGNTIAASYSAPISGSNYEYWTFSASINGIKEFYIKYEVSGKTYYDNNNSANYQVSTSKPTTTTATATTTTAPSTSTTTPPSRSEPATFPTGNSTISSWIKKQEGISRFAMLRNINPPGSATGFIAASLSTAGPDYYYAWTRDAALTSNVIVYEYNTTLSGNKTILNVLKDYVTFSVKTQSTSTVCNCLGEPKFNPDASGYTGAWGRPQNDGPAERATTFILFADSYLTQTKDASYVTGTLKPAIFKDLDYVVNVWSNGCFDLWEEVNGVHFYTLMVMRKGLLLGADFAKRNGDSTRASTYSSTASTIANKISSFWVSSNNWIQVSQSVTGGVSKKGLDVSTLLAANLGSVDDGFFTPGSEKILATAVAVEDSFASLYPINKNLPSYLGNSIGRYPEDTYNGNGNSQGNSWFLAVTGYAELYYRAIKEWIGNGGVTVSSISLPFFKKFDSSATSGKKYTVGTSDFNNLAQNIALAADRFLSTVQLHAHNNGSLAEEFDRTTGLSTGARDLTWSHASLITASYAKAGAPAA

SEQ ID NO: 109 - protein, 644 aa, Clostridium thermocellum
MANTYFNDAIIGNSGMLVCLTRNGELTRLFWPNIDYPQHFEKMATGIFYTGQKNSTSWFYEDNWHHTQYYVEDTNILKTICEDGGRGLRVEQTDFVLKDRDVMVRRYVIENIGPNEVDLGFVQYSSTVSTTPELRSTLFDFNVDALIHYRHNYYISISSDSEVVQFQLGNNAFDCARYTELYGYDSIGMMKDGAMSFNIGKIEPGGKKTFNLFICASHTLKGVKELVRWCRKMNVDEEYEKTRKYWLDFLKNARLIVTGDKNIDNLYKRSILVFKLMSDERTGGLLASAEIDEGFTRCGRYAYCWGRDAAFITGALDTAGLTEAVDKFYQWAVMTQDDDGSWQQRYHMDGNLAPSWGLQIDETGTLIWGMLKHYEVTKNIDFLKSMWESIKKGVEFLTRFIDSDTGLPAPSYDLWEERVGEHTYSSAAVYAGIKAGAEAARILGASEELIEKWEKAASDMKASIEKNFWRDEAGRFIRSVRTKLNPWGSEHSPYTTVIKVNEKGYFRDVTLEDWTIDVSLLGVSIPFGVFDVHDERVKKTVEAIERALTSHPVGGIKRYENDNYIGGNPWVLATLWVALYYIEIKEYEKAKDYLRWATKSCTALGLLPEQVSKDNGEPCWVIPLTWSHAMYVLVLAGLKEAGVL

SEQ ID NO: 110 - protein, 644 aa, Clostridium thermocellum
MQKSYYNNAITGNSSMLACFSERAELLRLFWPDIDYIQNLDKMFLGLFEKNKTGSTVWLNDIRCEHHQEYLPDSNIIKNMVTNFFDGYKVVLYDFVHPEMDVLVRRFEIENLRGESRELGLMSFSAATSSDSEVACSLFDFMNEALVHYKPDSYIAVTSDIPVYQFQIGNNANDAAVNTYLYGKDDIGMMKDAAISWDLGVFQPHAVKTTNVYLCAADTLKSCKALVRRVKTVGGLTAFRETGRYWKDYLEKTTKLKSGNTLLDDLYKRSLLVFRLMYSKKSGGLMAAPEVDEYFTKCGKYAYCWGRDAAFITGALDIGGLCESVDHFYKWAVNVQDEDGSWQQRYHMNGNLGPCWGLQVDETGTIIWGMLNHYNYTKNTDFLKSVWDSVKAAADFLVRFIDSETGLPRPSFDLWEERYGEHAYSSASVCAGLKSASEMARILGKPSQEYIQWETTADSIKKAIVKYFWKEDYRRFIRSIRVKLNGFGQEPSSDTMLIKVNPKGYVRDVTKEDWIVDVSLVGLGIPFEIFELNDPMLRDTVSLIEQVLTAQGVGGIKRYENDTYIGGNPWILTTLWIALYHAKSGNYKKAKEYLIWAASGKTELGLLPEQINRDTGKPEWIIPLTWSHAMYVHVYSELINAGVL

SEQ ID NO: 111 - protein, 608 aa, Arxula adeninivorans
DSCHTFTLANSPPDDKAVALSSYSYCGGYLSASAFVKNLSYDKLVTLYWTNADNKSTPLNAGSLDYVKAASDDQSWELWSLNVTTVPDGVDALLNITYVAASIGKTNSQQLNVQVEATGDPIPTPQIPTIYKPYASPSDFSDDITNWLKPSNDSQTGIAKSFLFNNINIPGAAPGTVIAAQSYSEPDYAYTWVRDASLVMDVVNRLYSSAKSEEKRQLYEKILFQYAKAGAQEQNDPTAISGMGEPKFYLNNTAFTGSWGRPQNDGPATRAITLIEFANAYLANGGSQDTVREQLYDSDKYPQVAPIKKDLQFVASNWSSPSFDLWEEEESAHFYTRLVQRKALLLGADFANDMGDHELSDKLKTQASKLSDTLPEFWDSARQLILYEYGPVLRGKYSYKDISVVLGVMHGYANDNVFSYTNDQILATAYQVSTSFLDVYKVANTTSDESGKPLGIPVGRYPEDVYDGVGTSQGNPWYLTTMAMAEFLYRSVQEFEDAGSIIISDTSLPFWKYFASSVDHKAGAKYNKNDQSFKTSLKSLTGWGDAFMRRAKYHTPSSGHMSEEFNRTTGEPRGAKDLTWSYASLLSAAFAREELRNQKNYLTNVADL

SEQ ID NO: 112 - protein, 595 aa, Hormoconis resinae
APTELKARDLSSFIASERAIALQGALNNIGPDGSAVPGAGAGFVVASPSKANPDYFYTWSRDSALTLKMIIDEFILGNTTLQTIIEQYIHAQAVLQTVSNPSGTFLPDGVGLGEPKFMVDGTRFNGPWGRPQRDGPALRAIALMTYSNWLIKNGQFAEAKTKIWPIIANDLSYVGQYWNQSGFDLWEETYASSFFTIQNQHRALVEGAQLAHDLGVTCTGCDQAPEVLCFLQSFWNGKYIVSNINVNNGRTGLDGNSILGAISTFDIDAYCDSPTLQPCHSQSLANFKVLTDTFRNLYTINAGIPEGQGVAVGRYAEDVYMGGNPWYLITTAAAEFLYDAVAQWKARHVLTVDETSLAFFKDIYPEVTVREYKSGNANSPFAQIMDAVTAYADSYVAIAEKYIPSNGSLSEQFNRDTGTPLSAIDLTWSYAAFITMSQRRAGQYPSSWGSRNALPPPTTCSASSTPGIYTPATAAGAPNVTSSCQVSITFNINATTYYGENLYVIGNSSDLGAWNIADAYPLSASAYTQDRPLWSAAIPLNAGEVISYQYVRQEDCDQPYIYETVNRTLTVPACGGAAVTTDDAWMGPVGSSGNC

SEQ ID NO: 113 - protein, 601 aa, Aureobasidium pullulans
LPSPESIQERATGSLSSWLSSENTVALQGVLNNIGASGSKASGASAGVVVASPSKSNPDYFYTWTRDSALVFKALVDQLIAGNKSLEPLIQQYISAQAKLQTVNNPSGGLCSGGLAEPKFEVDLTPFTGAWGRPQRDGPALRATAMIAYSRYLIANGNTTTVNNIIWPIVQNDLSYVTQYWNQTTFDLWEEINSSSFFTTAVQYRALVEGNNLATQLGKSCPNCVSQAPLVLCFLQSYWTGSYALSNTGGGRSGKDANSILTSIHIFDPAASCDSTTFQPCSDKALANHKVVTDSFRSIYSINQGIAQGSGVAVGRYPEDSYYNGNPWYLNTFAAAEQLYDAVYQWKKIGSISITSISLPFFKDVYSSAAVGTYSSSTVTFTSIVNAVQTYADSYMSIAQKYTPSNGALSEQYNRADGTPLSAVDLTWSYAAFLTAYNARANVLPASWGASSAKLPNSCSSGSATGPCAAATNTNWGNPGSPSTGTPTTTTGGSCTTPTSIAVTFNEQKTTSYGENIYIVGSIPALGNWNTANAVALSASKYTSSNPLWTVTINFATGTSFNYKYIKKAQDGSVTWESDPNRSYTVTGNCAGTATENDSWR

SEQ ID NO: 114 - protein, 718 aa, Bacillus subtilis
MVSIRRSFEAYVDDMNIITVLIPAEQKEIMTPPFRLETEITDFPLAVREEYSLEAKYKYVCVSDHPVTFGKIHCVRASSGHKTDLQIGAVIRTAAFDDEFYYDGELGAVYTADHTVFKVWAPAATSAAVKLSHPNKSGRTFQMTRLEKGVYAVTVTGDLHGYEYLFCICNNSEWMETVDQYAKAVTVNGEKGVVLRPDQMKWTAPLKPFSHPVDAVIYETHLRDFSIHENSGMINKGKYLALTETDTQTANGSSSGLAYVKELGVTHVELLPVNDFAGVDEEKPLDAYNWGYNPLHFFAPEGSYASNPHDPQTRKTELKQMINTLHQHGLRVILDVVFNHVYKRENSPFEKTVPGYFFRHDECGMPSNGTGVGNDIASERRMARKFIADCVVYWLEEYNVDGFRFDLLGILDIDTVLYMKEKATKAKPGILLFGEGWDLATPLPHEQKAALANAPRMPGIGFFNDMFRDAVKGNTFHLKATGFALGNGESAQAVMHGIAGSSGWKALAPIVPEPSQSINYVESHDNHTFWDKMSFALPQENDSRKRSRQRLAAAIILLAQGVPFIHSGQEFFRTKQGVENSYQSSDSINQLDWDRRETFKEDVHYIRRLISLRKAHPAFRLRSAADIQRHLECLTLKEHLIAYRLYDLDEVDEWKDIIVIHHASPDSVEWRLPNDIPYRLLCDPSGFQEDPTEIKKTVAVNGIGTVILYLASDLKSFA

SEQ ID NO: 115 - protein, 710 aa, Bacillus licheniformis
MPGISRPFEAYLDEMRTITVLVPKSRASSCSPPFLLEDDQGERIELSVKAQVELEEQFKYVLESSCTVPFGRVHKVCCEESVWTDLQIGSVTRSAAFDKAFFYDGRLGAFYSKGSTLFKVWAPTASAAAIKLEDPDSLQTNTFQMMRRKKGVFEVTVEGDLNGWSYLYELYVNGKPLLTVDPYAKAVTANGEKGVVLDPEEVKVEKHRAPRLHSPCDAVIYEVHIRDFSIHEDSGMRHKGKYVAFTEDGTETSGGFSTGIAYLKELGVTHIEVLPFHDFAGVDELSPDQSYNWGYNPLHFNAPEGSYSLDPQNPKCRITELKTMIQSLHKHGFSVIMDAVYNHVYKRETSPFEKTVPGYFFRHNEYGFPSDGTGVGNDIASERLMVRKYILDSVRYWLEEYDVDGIRFDLMGILDIETVRQISTLAENVKPGVPLFGEGWDLNTPLDSGQKATLQNAGKVPAVGFFNDRFRNAVKGSTFELSDRGYALGDTGKKAALQHGIAGSPGFLQPAQSINYVECHDNHTFWDKMALCFEEDADTKRLRQRLAVSIVLLSQGVPFLHAGQEFCRTKNGDSNSYRSGDDINKLDWEKRAELCEDVEYVRQLIRLRRSHPAFRLQKEEEVKEHLSFMDGTGEVTAYKLKNIAAIDPWNEIIVVHCPFAKKETLKLPDQKQYLLHCDPFTFFNGKVQAEKRLRLNGIGTYVLYEPKGIF

SEQ ID NO: 116 - protein, 918 aa, Oryza sativa
MAVGEECAAAVASQGFVSDARAYWVTRSLIAWNVNDQDTSLFLYASRDATMHVSDGAIHGYDSKIELEPEHASLPDNVAEKFPFIRSYRTFRVPSSVDVTSLVKCQLAVASYDAHGRHQDVTGLQLPGVLDDMFAYTGPLGAVFSDKDVDLYLWAPTAQDVRVCFYDGPAGPLLQTVQLKELNGVWSVTVPRYRENQYYLYEVKVYHPSTSQVEKCLADDPYARGLSANGTRTWLVDINSETLKPASWDELSDEKPNLESFSDISIYELHIRDFSAHDSTVDCNSRGGFRAFTFQDSAGIRHLRKLSAAGLTHVHLLPSFHFASVDDNKSNWKFVDEAQLAKLPPGSDEQQAAIVSIQQEDPYNWGYDPVLWGVPKGSYASNPDGPSRIIEYRQMVQALNRIGLRVVMDVVYNHLDSSGPFGVSSVLDKIVPGYYLRRNVNGQIENSAAMNNTASEHFMVDRLIVDDLLNWAINYKVDGFRFDLMGHIMKSTMFTVMSICTISTIIKIKDVFADTLIRAKSAIRSLTRDVHGVDGSKIYLYGEGWDFGEVAQNKRGINASQINMSGTGIGSFNDRIRDSVNGGNPFGNPLQQGFSTGLFLEPNGYYQGNEADTRRELATYADHIQIGLAGNLKDYVLRTHTGEAKKGSDIYTFDGSPVGYTSSPVETINYVSAHDNETLFDIVSIKTPIGLSIDEKCRINHLASSMIALSQGIPFFHAGDEILRSKSLDRDSYNSGDWFNKLDFTYETNNWGVGLPPRDKNEENWHLIKPRLENPSFRPLKNHILSVFDNFVDILKIRYSSPLFRLSTASDIEQRVRFHNTGPSMVPGVIVMSIKDAQNEKCKMAQLDKNFSYVVTIFNVCPHEVSIEIHDLASLGLELHPIQVNSSDALVRQSAYEASKGRFTVPRRTTAVFVQPRC

SEQ ID NO: 117 - protein, 963 aa, Triticum aestivum
MPMPMRTMLLRHLSPAPALPNPRRSSASSPQRRPARARPPPLHSARATALRARRTPMAAGETGASVSVSAAEAEAEATQAFMPDARAYWVTSDLIAWNVSEQEAASVYLYASRTAAMGLSPSNGGIQGYDSKVELQPESAGLPETVTQKFPFISSYRAFRVPSSVDVASLVKCQLVIASFGADGKHVDVTGLQLPGVLDDIFAYTGPLGAVFREDSVSLHLWAPTAQDVSVCFFDGPAGPVLETVQLKESNGVWSVTGPREWENRYYLYEVDVYHPTKAQVLKCLAGDPYARGLSANGARTWLVDINNETLKPASWDELADEKPKLDSFSDITIYELHIRDFSAHDGTVDSDSCGGFRAFAYQASAGMQHLRKLSDAGLTHVHLLPSFHFAGVDDIKSNWKFVDECKLATFPPGSDMQQEAVVAIQEEDPYNWGYNPVLWGVPKGSYASDPDGPSRIIEYRQMVQALNRIGLRVVMDVVYNHLDSSGPCGISSVLDKIVPGYYVRRDTNGQIENSAAMNNTASEHFMVDRLIVDDLLNWAVNYKIDGFRFDLMGHIMKHTMMRAKAALQSLTRDAHGVDGSKIYLYGEGWDFAEVARNQRGINGSQLNMSGTGIGSFNDRIRDAVNGGNPFGNPLQQGFNTGLFLEPNGFYQGNEADTRRSLATYADQIQIGLAGNLRDYVLITHTGETKKGSEIHTFDGLPVGYTSSPIEIINYVSAHDNETLFDVISVKTPMNLSVDERCRINHLASSMMALSQGIPFFHAGDEILRSKSIDRDSYNSGDWFNKLDFTYETNNWGVGLPPSEKNEDNWPLMKPRLENPSFKPAKGHILAALDSFVDILKIRYSSPLFRLSTASDIKQRVHFHNTGPSSVPGVIVMGIEDARDEKPEMAQLDANFSYVVTVFNVCPHEVSMDIPALASMRLELHPVQVNSSDALVGKSVYEAATGRFTVPRRTVSVFVEPRC

SEQ ID NO: 118 - protein, 647 aa, Clostridium phytofermentans
MDEFWNSIDGEKQYYYDGNDLGCTYTNRSTKLKVWAPTASMVVVNLYQNGNAGKPYITEIMKKEESGIWSVCLLGDLEGVYYTYLVTVDGQTKEAVDPYARTTGLNGKRAMILDLEKTNPTGFLEDTKPKFDSFLDAVIYELHIRDLSMESDSGIKEKGKLLGLTELNTRNSDGLTTGLSHILDLGVTHIHLLPCFDYASVDEENSSIFNWGYDPENYNVVEGSYSTNPYDGAVRVKEFKTLVQSLHENGLRVIMDVVYNHTMKTEESNFNKIVPDYYYRKVGDKFSDASACGNETASERLMVRKFIVDSIIYWAKEYHIDGFRFDLMGIHDIETMNEVRKVLDQIDPSIILYGEGWVGGDSPLPAGQRAMKANMSMLPGIAAFSDDFRDGLKGSVFLAEEKGFATGDSDKKESVKFGVVASTLHPQIDYKKVNYSDSPWALEPAQCINYVSAHDNYTLWDKIACSCKEDTYEIRVKKNKLCAAIVFTSQGIPFLQAGEEMLRNKPSSEIAGEFVENSYNSSDSVNCIKWSNKANVIDVVSYYEGLIRFRKEHKALRMQSAKEISKRLTFLPEEREDVISYLIQGDLVDKTLCVIYNSSEEKVTIRLPESDWTVYIDGNNSGVEPLYEVKGTTVEVEPISCMVLVKD

SEQ ID NO: 119 - protein, 1764 aa, Streptomyces avermitilis
ATPPAPPSDAKLAAEPARHDATREQFYFVMPDRFANGDTSNDKGGLTGSRLSTGYDPTDKGFYQGGDLKGLTRKLDYIKGLGTTSIWLAPIFKNQPVQGTGKDASAGYHGYWITDFTKVDPHFGTNKDLETLISKAHAKGMKVFFDVITNHTADVVDYEEKSYGYLSKGAFPYLTKDGRPFDDAGYTDGPRKFPAVDGDSFPRTPAVAARKKNAKVPSWLNDPTMYHNRGDSTFAGESSTHGDFSGLDDLWTERPEVVRGMEKIYEKWVRDFGIDGFRIDTVKHVNTEFWTQWATALDAYAKKRGKDDFFMFGEVYSADTSVTSPYVTQGRLDSTLDFPFQDAARSYASQGGSAKKLASVFGDDYKYTTDKANAYEQVTFLGNHDMGRIGYFLNQDNPKATDAELLRKDRLANELMFLSRGNPVVYYGDEQGFTGSGGDKDARQTMFASKVADYLDDDEIGTDRGHASDAYDTSAPLYKEIAALSKLRKDNPALADGIQTERYAADGAGVYAFSRTDARTGTEYVVAVNNADKASAATFATGSADTAFKGIHGTDDVLKSDADKKITVTVPAGAAVVLKAAGRPGTPAAKPSLTLKAPDAGATGTVELSADVDGGRLNRVVFAAQVGNAKWRTLGSADHAPYRVTQTIGKDVPAGTALRYKAVVIDAAGRTASATAASTTGTPPAAETPTASSRDYAIVHYKRPDGDYTDWRLYAWGDLADGESTTWPAGHDFVGRDAYGAFAYVKLKPGASTVNFLVIDKDGDKDVSADRTIDVTKAGEVWVEQGKETVRTERPDYPAQDKTKAVIHYHRADGDLTGWGLHVWTGAATPTDWSKPLEPVRTDAYGAVFEVPLTDGATSLSYIIHKGDEKDLSADRSLDLTADGHEVWLLNGQENHLLPQPAGSAAALDLTTSKAVWIDRNTVAWNGSDAAASTQLLSSRDGSIAVKDGSLTSDDERWLRLSKTSLTDAQKAAFPHLKSYTAWSVDPRDRDRVREALAGQVVASQRAANGAVLAATGVQLAGVLDDLYDATKADLGPTFRGGHPTLAVWAPTAQSVSLELDGAHVRMKRNNATGVWSVTGPASWKGKPYRYVVKVWAPTVRKVVTNKVTDPYSVALTTDSERSLVVDLDDRSLAPSGWSSLKKPKAVPLRDAEIQELHIRDFSVADRTVPAKDRGTYLAFTDKNSDGSRHLRQLAESGTSYVHLLPAFDIATIAEKKSGQQATDCDLASYAADSEKQQECLTAVAAKDAYNWGYDPYHYTVPEGSYATDANGTRRTVEFRRMVKSLNQDGLRVVMDVVYNHTAAAGQAGTSVLDRIVPGYYQRLLADGSVATSTCCANTATENAMMGKLVVDSLVTWAKEYKVDGFRFDLMGHQPKANILAVRKALDALTVAKDGVDGKKIILYGEGWNFGEVADDARFVQATQKNMAGTGIATFSDRARDAVRGGGPFDADPGVQGFGSGLYTDPNSSDANGTPAEQKARLLHYQDLIKVGLSGNLAKYRFTDSSGKEVTGSEVDYNGTGAGYADAPGDALAYADAHDNESLYDALTYKLPKGTPAGDRARMQVLAMATAALAQGPSLSQAGSDLLRSKSLDRNSYDSGDWFNAIHWNCQDGNGFGRGLPMAADNKSKWPYATPLLTSVKVGCDQIEGTSAGYQDLLRIRTTEPDFSLSTAGQVQSKLTFPLSGKDETPGVITMKLGDLVVVFNATPDQQEQTVAALAGKDYALHPVQAAGADPIVKSASYTAKSGMFAVPGRTVAIFSQVAR

SEQ ID NO: 120 - protein, 1079 aa, Klebsiella pneumoniae
SSSSPSGSPGSPGNPGNPGTPGTPDPQDVVVRLPDVAVPGEAAQASANQAVIHLVDIAGITSSTPADYATKNLYLWNNETCDALSAPVADWNDVSTTPTGSDKYGPYWVIPLTKESGCINVIVRDGTNKLIDSDLRVSFGDFTDRTVSVIAGNSAVYDSRADAFRAAFGVALADAHWVDKTTLLWPGGENKPIVRLYYSHSSKVAADSNGEFTDKYVKLTPTTVSQQVSMRFPHLASYPAFKLPDDVNVDELLQGETVAISAESDGILSSATQVQTAGVLDDTYAAAAEALSYGAQLTDSGVTFRVWAPTAQQVELVVYSADKKVVASHPMTRDSASGAWSWQGGSDLKGAFYRYAMTVYHPQSRKVEQYEVTDPYAHSLSTNSEYSQVVDLNDSALKPEGWDGLTMPHAQKTKADLAKMTIHESHIRDLSAWDQTVPAELRGKYLALTAQESNMVQHLKQLSASGVTHIELLPVFDLATVNEFSDKVADIQQPFSRLCEINSAVKSSEFAGYCDSGSTVEEVLTQLKQNDSKDNPQVQALNTLVAQTDSYNWGYDPFHYTVPEGSYATDPEGTARIKEFRTMIQAIKQDLGMNVIMDVVYNHTNAAGPTDRTSVLDKIVPWYYQRLNETTGSVESATCCSDSAPEHRMFAKLIADSLAVWTTDYKIDGFRFDLMGYHPKAQILSAWERIKALNPDIYFFGEGWDSNQSDRFEIASQINLKGTGIGTFSDRLRDAVRGGGPFDSGDALRQNQGVGSGAGVLPNELTSMTDDQARHLADLTRLGMAGNLADFVLIDKDGAVKKGSEIDYNGAPGGYAADPTEVVNYVSKHDNQTLWDMISYKAAQEADLDTRVRMQAVSLATVMLGQGIAFDQQGSELLRSKSFTRDSYDSGDWFNRVDYSLQDNNYNVGMPRSSDDGSNYDIIARVKDAVATPGETELKQMTAFYQELTALRKSSPLFTLGDGATVMQRVDFRNTGADQQTGLLVMTIDDGMQAGASLDSRVDGIVVAINAAPESRTLQDFAGTSLQLSAIQQAAGDRSLASGVQVAADGSVTLPAWSVAVLELPQGESQGAGLPVSSK

SEQ ID NO: 121 - protein, 546 aa, Rhizomucor pusillus
ATSDDWKGKAIYQLLTDRFGRADDSTSNCSNLSNYCGGTYEGITKHLDYISGMGFDAIWISPIPKNSDGGYHGYWATDFYQLNSNFGDESQLKALIQAAHERDMYVMLDVVANHAGPTSNGYSGYTFDDASLYHPKCTIDYNNQTSIEQCWVADELPDIDTENSDNVAILNDIVSGWVGNYSFDGIRIDTVKHIRKDFWTGYAEAAGVFATGEVFNGDPAYVGPYQKYLPSLINYPMYYALNDVFVSKSKGFSRISEMLGSNRNAFEDTSVLTTFVDNHDNPRFLNSQSDKALFKNALTYVLLGEGIPIVYYGSEQGFSGGADPANREVLWTTNYDTSSDLYQFIKTVNSVRMKSNKAVYMDIYVGDNAYAFKHGDALVVLNNYGSGSTNQVSFSVSGKFDSGASLMDIVSNITTTVSSDGTVTFNLKDGLPAIFTSAGATSPGGSSGSVEVTFDVYATTVYGQNIYITGDVSELGNWTPANGVALSSANYPTWSATIALPADTTIQYKYVNIDGSTVIWEDAISNREITTPASGTYTEKDTWDES

SEQ ID NO: 122 - protein, 481 aa, Bacillus licheniformis
VNGTLMQYFEWYTPNDGQHWKRLQNDAEHLSDIGITAVWIPPAYKGTSQADVGYGAYDLYDLGEFHQKGTVRTKYGTKGELQSAIKSLHSRDINVYGDVVINHKGGADATEDVTAVEVDPADRNRVISGEHLIKAWTHFHFPGRGSTYSDFKWYWYHFDGTDWDESRKLNRIYKFQGKTWDWEVSNEFGNYDYLMYADIDYDHPDVVAEIKRWGTWYANELQLDGFRLDAVKHIKFSFLRDWVNHVREKTGKEMFTVAEYWSNDLGALENYLNKTNFNHSVFDVPLHYQFHAASTQGGGYDMRKLLNGTVVSKHPLKSVTFVDNHDTQPGQSLESTVQTWFKPLAYAFILTRESGYPQVFYGDMYGTKGDSQREIPALKHKIEPILKARKQYAYGAQHDYFDHHDIVGWTREGDSSVANSGLAALITDGPGGAKRMYVGRQNAGETWHDITGNRSEPVVINSEGWGEFHVNGGSVSIYVQR

SEQ ID NO: 123 - protein, 484 aa, Aspergillus niger
LSAAEWRTQSIYFLLTDRFGRTDNSTTATCDTGDQIYCGGSWQGIINHLDYIQGMGFTAIWISPITEQLPQDTADGEAYHGYWQQKIYDVNSNFGTADDLKSLSDALHARGMYLMVDVVPNHMGYAGNGNDVDYSVFDPFDSSSYFHPYCLITDWDNLTMVQDCWEGDTIVSLPDLNTTETAVRTIWYDWVADLVSNYSVDGLRIDSVLEVEPDFFPGYQEAAGVYCVGEVDNGNPALDCPYQKVLDGVLNYPIYWQLLYAFESSSGSISNLYNMIKSVASDCSDPTLLGNFIENHDNPRFASYTSDYSQAKNVLSYIFLSDGIPIVYAGEEQHYSGGKVPYNREATWLSGYDTSAELYTWIATTNAIRKLAISADSAYITYANDAFYTDSNTIAMRKGTSGSQVITVLSNKGSSGSSYTLTLSGSGYTSGTKLIEAYTCTSVTVDSSGDIPVPMASGLPRVLLPASVVDSSSLCGGSGRLYVE

SEQ ID NO: 124 - protein, 586 aa, Aspergillus tamarii
ATPADWRSQSIYFLLTDRFARTDGSTTAACNTEDRKYCGGTWQGIIDKLDYIQGMGFTAIWITPVTGQLPQHTAYGDAYHGYWQQDIYSLNENYGTADDLKALSSALHERGMYLMVDVVANHMGYDGAGASVDYSVFKPFNSQEYFHSFCLIQNYEDQTQVENCWLGDNTVSLPDLDTTKDEVKNEWYDWVGTLVSNYSIDGLRVDTVKHVQKDFWPGYNKAAGVYCIGEVLDGDPAYTCPYQDVMDGVLNYPIYYPLLNAFKSTSGSMNDLYNMINTVKSDCPDSTLLGTFVENHDNPRFASYTNDIALAKNVAAFIILNDGIPIIYAGQEQHYAGGNDPANREATWLSGYATDSELYKLIASANAIRSHAISKDTGFVTYKNWPIYKDDTTIAMRKGTDGSQVVTILSNKGASGDSYTLSLGDTGYKAGQQLTEVIGCTTVTVGSDGKVPVPMAGGLPRVLYPTEKLADSKICSSSGATSPGGSSGSVEVTFDVYATTVYGQNIYITGDVSELGNWTPANGVALSSANYPTWSATIALPADTTIQYKYVNIDGSTVIWEDAISNREITTPASGTYTEKDTWDES

SEQ ID NO: 125 - protein, 603 aa, Acidomyces richmondensis
LTPAEWRAQSIYQVLTDRFALTNGSTTAPCNLNEYCGGTWQGIINKLDYIQGMGFTAIWISPVVENIPASDNTADGESYHGYWAQRIYEVNPNFGSAADLEALSEAIHARGMYLMVDIVTNHMGYDGCGTCVDYSVFDPFDNQSYFHPFCLINYNNATSIQVCWEGDNIVSLPDLRTEDSDVLGMWETWITQLVANYSIDGLRVDSMQQVDQAFWQPFMSAAGDLYAVGEVFNGDPTYTCPYQQYLPGVLNYPAYYWITQAFESTSGSIGNLVNGINEMKNDCLDTTLLGSFLENHDNPRFPSYTSDYSLDKNAIAFAMLQDGIPIVYEGQEQHYSGGSVPNNREDIWSSGYSTTSELYTFIKIINAIRTQALTKDSSYLTYKAYPVYSDSQTIAMRKGETYPIISVFTNSGASGSAYSITLSSSDTGFSENQSITELLTCTVSTTDSGGNLVVNISSGLPRVYYPTSAISGSTVCAESTSTLTISSPISTSTSDCTTASSVAVTFDETVTTTYGETIKLSGSISQLGDWNTQDAILLSAADYKSTDNVWFVTINLPAGIVFQYKYINVDSDGDVTWEADPNHTYTVSATCATAATIHDTWQN

SEQ ID NO: 126 - protein, 588 aa, Aspergillus bombycis
ATPADWRSQSIYFLLTDRFARTDGSTTATCNTEDRKYCGGTWQGIIDKLDYIQGMGFTAIWITPVTGQLPQDTAYGEAYHGYWQQDIYALNENHGTADDLKALSSALHERGMYLMVDVVANHMGYDGAGASVDYSVFNPFSSQDYFHSFCLIENYDDQTQSENCWLGDNSVSLPDLDTTKDEVKNEWYEWVGNLVSNYSIDGLRVDTVKHVQKDFWPGYNEAAGVYCIGEVLNGDPAYTCPYQDVMDGVLNYPIYYPLLNAFKSTSGSMNDLYNMINTVKSDCPDSTLLGTFVENHDNPRFASYTNDIALAKNVAAFIILNDGIPIIYAGQEQHYAGGNDPANREATWLSGYSTDSEIYKLIASANAIRNHAVSTDTGFVTYKNWPIYKDDTTIAMRKGTDGSQIVTILSNKGASGDAYTLSLGNTGYTAGQQLTEVIGCTTLTVGSDGNVPVPMAGGLPRVLYPTEKLGDSKICSSSGRGATSPGGSSGSVEVTFDVYATTVYGQNIYITGDVSELGNWTPANGVALSSANYPTWSATIALPADTTIQYKYVNIDGSTVIWEDAISNREITTPASGTYTEKDTWDES

SEQ ID NO: 127 - protein, 570 aa, Alternaria sp.
ADTSAWKSRSIYFVLTDRIARSSSDTGGGSCSNLGNYCGGTFKGLESKLDYIKNLGFDAIWITPVVANSAGGYHGYWAQDLYAVNSNYGTAADLKSLVNTAHSKGIYVMVDVVANHMGQGAISGNRPEPLNQDSSYHSACDINYSSQTSIEQCRIANLPDLNTQSSQIRSLLNTWISWLVNEYSFDGVRIDTVKHVEKDFWPGFASAAGVYSIGEVWDGNPTYLAEYARLMPGLLNYATYYPMNNFYQQKGSSQALVDMMNTVRDTFPDPSALGTFLDNHDNNRWLNQKNDVTLLKNALAFVILSRGIPIVYYGTEQGYAGGADPANREDLWRSSFNTNADLYQAIKKLNAARTSAGGLAGNDHTHLYVSSNAYAWSRANGNLVVLTTNAGSGSNAQHCFNTQKANGRWTNVYGNGATVTADGSGNICVNVANGEPVVLLVSTATPTSATPTSNPSPTTLLTTSTACPTSVSVSFTHRVTTVFGDTIKITGNTAQLGNWNPSNGVALSAASYTSSNPIWTLTLPLPAGSAIQYKFVKVSSGGTVTWESDPNRSYSVPGCQASASVSSQWQ

SEQ ID NO: 128 - protein, 551 aa, Rhizopus microsporus
SPITIRSQNSNDWSSRVIYQLLTDRFAKTVDDQSPCSDLGNYCGGSFQGIINHLDYIAGMGFDAIWISPIPQNAQGGYHGYWATNFSAINSNFGSSNDLKKLVQAAHAKNMYVMLDVVANHVGTPSTPNNYNGYTFNQGSYYHSYCDINYNDQTSVEQCWLSGLPDLNTENDYVVNTLYSTVSNWISEYGFDGIRIDTVKHVRKDFWDGYVKAAGVFATGEVLHGSVSYVAPYQSHVPSLINYPLYYPIYDVFTKAATMTRLKSGYNDIQSGGFSNLNLLLNFIDNHDNPRLLSKADQSLVKNALTYSMLIQGIPVVYYGTEQSYKGGNDPNNREPLWTSGYSSSSEMYQFIKQVIQIRKGSNATVTMDIDQADNVYVFQRGNYLAVVNNYGQGSTNSVTVKSGSFADGTVLKDVFSGATATVKNKSITFQLQNGNPAVFSPQGATSPGGSSGSVEVTFDVYATTVYGQNIYITGDVSELGNWTPANGVALSSANYPTWSATIALPADTTIQYKYVNIDGSTVIWEDAISNREITTPASGTYTEKDTWDES

SEQ ID NO: 129 - protein, 565 aa, Syncephalastrum racemosum
VPLSIIDKRAGVTTLSKRAAADDWKSRSIYQIVTDRFARSDGSTSGCGDLSNYCGGDYKGIQNQLDYIAGMGFDAIWISPIPENTDGGYHGYWAKNFEALNTNFGSADDLKALVTAAHGKGMYVMLDVVANHAGPTSGGDYSGFTFDSASNYHAQCDIDYENQTSIEQCWVADNLPDINTEDDTIVSKLHSIVSDWVTTYDFDGIRIDTVKHIRKDFWSGYEEAAGVFATGEVFDGDAAYVGPYQDQLSSLINYPLYYAIRDVFTAGSGFSRISDMLSSINSNFKDPSVLTTFVDNQDNARFLSVKSDTSLYKNALAFTILTEGIPVVYYGTEQGFKGGNDPNNREVLWTSNYDTSSDLYKFIKIVNDQVRQKSNKTVKLNVDVGTNTYAFTHGKNLIVVNNYGSGSTASVTVKVGDSIADGTKLVDAVSNITATVSGGSITFSLNNGLPALFVPSSGATSPGGSSGSVEVTFDVYATTVYGQNIYITGDVSELGNWTPANGVALSSANYPTWSATIALPADTTIQYKYVNIDGSTVIWEDAISNREITTPASGTYTEKDTWDES

SEQ ID NO: 130 - protein, 583 aa, Rhizomucor pusillus
ATSDDWKGKAIYQLLTDRFGRADDSTSNCSNLSNYCGGTYEGITKHLDYISGMGFDAIWISPIPKNSDGGYHGYWATDFYQLNSNFGDESQLKALIQAAHERDMYVMLDVVANHAGPTSNGYSGYTFDDASLYHPKCTIDYNNQTSIEQCWVADELPDIDTENSDNVAILNDIVSGWVGNYSFDGIRIDTVKHIRKDFWTGYAEAAGVFATGEVFNGDPAYVGPYQKYLPSLINYPMYYALNDVFVSKSKGFSRISEMLGSNRNAFEDTSVLTTFVDNHDNPRFLNSQSDKALFKNALTYVLLGEGIPIVYYGSEQGFSGGADPANREVLWTTNYDTSSDLYQFIKTVNSVRMKSNKAVYMDIYVGDNAYAFKHGDALVVLNNYGSGSTNQVSFSVSGKFDSGASLMDIVSNITTTVSSDGTVTFNLKDGLPAIFTSATGGTTTTATPTGSGSVTSTSKTTATASKTSTSTSSTSCTTPTAVAVTFDLTATTTYGENIYLVGSISQLGDWETSDGIALSADKYTSSDPLWYVTVTLPAGESFEYKFIRIESDDSVEWESDPNREYTVPQACGTSTATVTDTWR

SEQ ID NO: 131 - protein, 553 aa, Dichotomocladium hesseltinei
QPVNITKRASAADWRSRAIYQVLTDRFARTDGSTSGCSNLSNYCGGTFKGITNKLDYIANLGFDAIWISPIPTNSPGGYHGYWATDFYGINSNFGSSNDLKELVNAAHAKGMYVMLDVVANHAGPTSNGDYSGYTFGSSGLYHNRCSINYNDQRSIEQCWVADDLPDINTENNDNVNKPNNIVSTWVKTYGFDAIRIDTVKHVRKDFWPGYTSAAGVFATGEVFDGNPSYVADYQNYMESLINYPLYYALNDVFASGYSFSRLSNQRVANYHAFKDVSVLPIFIDNHDNPRFLNKKNDIAQFKNALTYVLLGEGIPVVYYGSEQAYAGGADPANREALWSSGFSTNSDMYQFIAKLNRVRQKSNKSVYMDLDVQNNVYAFMHGKSLVVLNNFGNGASRQVTVNVGAQVASNTRLTDVVSGTSVTVSGSSVTFTINNGLPAVFTVSGATSPGGSSGSVEVTFDVYATTVYGQNIYITGDVSELGNWTPANGVALSSANYPTWSATIALPADTTIQYKYVNIDGSTVIWEDAISNREITTPASGTYTEKDTWDES

SEQ ID NO: 132 - protein, 552 aa, Lichtheimia ramosa
RPFVKRATADDWRDRAIYQILTDRFARSDGSTDNCSDLSNYCGGNYQGIIQQLDYIEGMGFDAIWISPIPANADGGYHGYWATDFESLNDHFGSQDDLKALVDAAHERGMYVMLDVVANHAGPTNNGDYSGYTFGSSDLYHPQCSIDYSNQNSIEQCWVADNLPDIDTENDSNVNKLHDIVSTWVSTYGFDGIRIDTVKHVRKDFWPGYASAAGVFATGEVYDGDQTYVGAYQDYLDSLLNYPLYYALNDVFASGQGFQRLSNQRNAIMSAFKDVSVLTSFVDNHDVARFLSTKNDQALFKNALAFVLLGETIPVVYYGSEQGFAGGADPANREALWSSGYDTSSDLYQFIATINNNVRQKSGKKVYMDLDVQDNVYAFMHGDALVVLNNYGSGASNQVSVNVGAQVAESTSFTDAISGTSITVSSGSVTFTLDNGNPAIFVPAGATSPGGSSGSVEVTFDVYATTVYGQNIYITGDVSELGNWTPANGVALSSANYPTWSATIALPADTTIQYKYVNIDGSTVIWEDAISNREITTPASGTYTEKDTWDES

SEQ ID NO: 133 - protein, 587 aa, Penicillium aethiopicum
ARTADWKPRSIYQTMTDRFARTDGSTTSPCNTKAGLYCGGTWRGTIDHLDYIQGMGFDAVMISPIIENIEGRVDYGEAYHGYWPLNLDNLNSHFGTHQDLLDLSDALHSRGMYFMMDTVINNMAYITNGSDPATDIDYSVFTPFNNADYFHPYCTMNWSVPAIAQRCNTGDDTVALPDLFTEHEDVQQLLIKWANKAIKTYSIDGLRIDAAKHVNPDFLRKFSDGVDIFMTGEVLEGSVSIMEDYQSNYINSLPNYPIYFEILSAFTNGNTSQLAIAVENMRVAIPDVNAMASFSENHDKPRIASYNDDMSIAKNVLVFTMLFDGIPMIYQGQEQHLKGDGVPHNREAIWLSKYDTEAELYKLIAKLNRIRNHAGYLGSDYFEDATHPIYQGSSELAFTKGVQGRQVVMVLSNQPSTSGRYALDLAVSYNAGTELMDVLNCNNYTVDNQGVLRVDMDKGEPRVFFPRKYMEGSGLCGYSGATSPGGSSGSVEVTFDVYATTVYGQNIYITGDVSELGNWTPANGVALSSANYPTWSATIALPADTTIQYKYVNIDGSTVIWEDAISNREITTPASGTYTEKDTWDES

SEQ ID NO: 134 - protein, 597 aa, Subulispora sp.
LTPAEWGSQSIYQVLTDRFALTDGSTTASCDLNTYCGGTWLGIQNHLDYIQGMGFTAIWISPIVTNIAGDSVDGDSYHGYWAQDITTVNSAFGTEQDLINLSAALHERGMYLMVDVVNNHMGYLGCGTCVDYSEYTPFNEESYYHPYCPTDYSNLTSIQVCWEGDNIVSLPDLRTEDSDVRSMWYDWITPLVAKYSIDGLRMDSAEHVEKSFWPGWVSASGVYNVGEVDEGDPTIFPDWLNYIDGTLNYPAYYWITQAFQSTSGSISNLVTGVNQLKASMKTSTFGSFLENHDQPRFPSLTSDTDLAKNAIAFAMLADGVPIVYYGQEQGYSGGGVPNDREPLWTSGYSTTSAGYTFIKTINAVRHLAVTQDTAYVAYQAYPIYSDSRVIAMKKSSVLAVFSNIGSSGSGYSITLPAGAFAASQALTDAVSCQTYTADASGGLTFTFGQAPSVFYATASLAGSGLCGTTGTGGSTGTTTASETGGSSPTSTACASVPVTFNEKVTTVVGETIKISGSVAALGDWATGSAVALSAASYTSSNPQWDVTISFAPGTVIEYKYINVASSGAVTWEADPNHTYTVPASCATAAVVSDTWQT

SEQ ID NO: 135 - protein, 601 aa, Trichoderma paraviridescens
LTAAQWRSQSIYQVLTDRFSQTNGATNSACNAGNQVYCGGTWQGIIKNLDYIKSMGFTAIWISPVVENLAGNSADGEAYHGYWAQDIYQVNTNFGSAADLRALSEALHNAGMYLMVDIVTNHMGYLGCGTCVQYNTFNPFNSQSYYHPFCLINFNSSNMTQIQNCWEGDNTVSLPDLATENANVLSMWQTWITQLVANYTIDGLRMDSCFELNYGYFEPFQSSANVYIVGEVDNGDPAIVCPYQKNYGLNTLNYPAYYWITQAFQSTSGSISNLVNGLNTMKSECSDTTLLGSFMENHDNPRFPSLTSDISLAKNAIAFTMLADGIPIIYEGQEQHLNGGGVPNNREAIWLSGYSTSAVLYTHIKALNQIRSQAIKQNSAYVTTQAAVTYSDSSTIVTRKGSTGSQIVGVFSNKGANGNSYTLTLPSADTGFTSNEQVVEILSCTAYTTDSSGNLAVAMAGGLPRVFYARSSLSGSGICPNLGSGGGTPTSTPPTSCTAIPVTFDEKVTTTFGQTIKIAGDISALGNWNTANAVTLSAANYTSSNPLWAITLNLAPGQVVEYKYINVAQNGGVTWEADPNHTYTVPSACTAQPTVANTWQG

SEQ ID NO: 136 - protein, 598 aa, Byssoascus striatosporus
LSADDWRAQSIYQLLTDRFALTNGSTTAPCDTEEQIYCGGSWQGIIDKLDYIQGMGFTAIWISPVVENLSGDSADGEAYHGYWAQNVYEVNPNFGATSDLVALSQVVHDKGMYLMLDVVTNHMGYLGCGTCVDYSVFNPFNEESYYHPFCLIDYDNTTSIEVCWEGDNIVSLPDLRTEDSDVLSTWESWVTELVSNYTVDGIRLDSTEELDQAFLPPFESAAGVYIVGEVDNGDPAVVCPYQEYVSGVLNYPAYYWITQAFESTSGSIGNLVNGINTMKSDCSDTSLLGSFLENHDQPRFASLTSDISLAKNAIAFSMLQDGIPIVYAGEEQHYSGGAVPNDREALWLSGYPTSSTLYTWITSLNQIRSHAIATNSSYLTYNAYPVYSDDSTIVMRKGFADNQIVSVYTNQGADATAYTLDLPSTDTGFTASQSLVEIGGCTTTATDDSGNLAVAMASGLPRIYYPAAGLSGSGVCGQLGSGGGTPTSTPPTSCTAIPVTFDEKVTTTFGQTIKIAGDISALGNWNTANAVTLSAANYTSSNPLWAITLNLAPGQVVEYKYINVAQNGGVTWEADPNHTYTVPSACTAQPTVANTWQG

SEQ ID NO: 137 - protein, 615 aa, Aspergillus brasiliensis
LSAAEWRTQSIYFLLTDRFGRTDNSTTATCNTGDQIYCGGSWQGIINHLDYIQGMGFTAIWISPITEQLPQDTSDGEAYHGYWQQKIYDVNSNFGTADDLKSLSDALHARGMYLMIDVVPNHMGYAGSGNDVDYSVFDPFDSSSYFHPYCLITDWDNLTMVQDCWEGDTIVSLPDLNTTETVVRTIWYDWVADLVSNYSVDGLRIDSVLEVEPDFFPGYQEAAGVYCVGEVDNGNPALDCPYQDYLDGVLNYPIYWQLLYAFESSSGSISDLYNMIKSVASDCSDPTLLGNFIENHDNPRFAYYTSDYSQAKNVLSYIFLSDGIPIVYAGEEQHYSGGDVPYNREATWLSGYDTSAELYTWIATTNAIRKLAIAADSSYITYANDPIYTDSNTIAMRKGTSGSQVITVLSNKGSSGSSYTLTLSGSGYTSGTKLIEAYTCTSVTVDSNGDIPVPMASGLPRVLLPASVVDDSSLCGGSGSSTSTTTSTATATTTSKTSTTSSSSSSSSCTASATAIPITFEELVTTTYGEEIYLSGSISQLGDWDTSDAVKLSADDYTSSNPEWSVTVTLPVGTTFEYKFIKVESGGSVTWESDPNREYTVPECGSGETVVDTWR

SEQ ID NO: 138 - protein, 604 aa, Penicillium subspinulosum
ALSAEWRTQSIYFLLTDRFGRTDNSTTATCDTGDQIYCGGSWQGVINHLDYIQGMGFTAIWISPITEQLSGDTSDGEAYHGYWQQKIYNVNSNFGTADDLVALSDALHARDMYLMLDVVPNHMGYDGDGDDVDYSVFDPFDSSSYFHPYCLITDYDDIEMVQDCWEGDTIVSLPDLNTTETVVQDIWYAWVADLVANYSVDGLRIDSVLEVQPAFFPAYQSAAGVYCVGEVDNGDPTLDCPYQDYLDGILNYPIYYQLLYAFESSSGSISDLYDMINSVASDCSDPTLLGNFIENHDNPRFAYYTSDYSQAKNVASFIFLSDGIPIVYAGQEQHYSGGDVPYDREATWLSGYSTTAELYTWIATTNSIRKLAISLDDDYITYVNDPFYTDENTIAMRKGTSGLQVITVLSNLGADGSAYTLTLSGSGYDSGTDLIEVYTCTSVTVDSSGDIAVPMESGLPRVFLPESSIKDSDLCSGTTTTTTSTAATATATSTSTCTAATEVSIIFEELVTTTYGEEIYLSGSISELGSWDTSDALELSAANYTSSNPEWYLEVTLPVGTSFEYKFIMIESDGTVVWESDPNRSYTVPSACSGAVETVVDTWR

SEQ ID NO: 139 - protein, 606 aa, Penicillium antarcticum
LTPAEWRSQSIYFMLTDRFGRSDNSTTAACNVSDRTYCGGTWQGIINHLDYIQGMGFTAIWITPVTEQLPQDTGDGEAYHGYWQQNIYEVDSNLGTAADLLALSEALHARGMYLMVDVVANHMGYAGAGSSVEYSVFHPFSSSSYFHSYCLISNYDDQSNVEDCWLGDTIVSLPDVDTTQTAVQTLWYDWIGDLVSNYSIDGLRIDTVKHVQKSFWPGYNDAAGVYCVGEIFDGDPAYTCDYQNYMDGVLNYPIYYQLLYAFQSSSGSISDLYDMINSVKSDCADPTLLGNFIENHDNPRFASYTSDYSQAKNVISFLFLSDGIPIIYSGQEQHYSGGADPANREATWLSGYSTTAELYKYIATTNRIRKAAVSADSSYITTKNVPFYQDSHTLAMKKGSSASPVITVLSNYGSSGSSYTLSLSGSGYSSGTNLMEMYTCTSVTVDSSGNIAVPMASGLPRVLMLASSASSICASSTTTSTATVATQTTTLTTTGTSCTQATVLPVLFKELVTTTYGQNVYISGSISQLGSWDTSSAIALSASSYNSSNPLWQVAITLPVGTSFQYKFLEKTTGSTTIQWESDPNRSYTVPTGCVGTTATAIATWR

SEQ ID NO: 140 - protein, 609 aa, Penicillium coprophilum
LTPAEWRSQSIYFLLTDRFGRTDNSVTANCNVNDRVYCGGTWQGIINQLDYIQGMGFTAIWITPVTKQLSQNTGDGTSYHGYWQQDIYNVNPNHGTSDDLLALSKALHARGMYLMVDVVANHMGYAGAGNNVDYSVFTPFNSASYFHSYCLISNYNDQSNVENCWLGDTTVSLPDLDTTQSSVQTLWNNWISDLVSKYSIDGLRVDTVKHVQKSFWPAFNRAAGVYSVGEVFDGSPSYTCDYQKYMDGVLNYPMYYPLLRAFQSTSGSISDLYNMIGTLSSTCADSTLLGNFIENHDNPRFPSYTSDYSQAKNVLSFLFLSDGIPIVYSGQEQHYSGGSDPANREALWLSKYSTTAELYKYIATTNKIRKAAVAADSSYITSKNVAFYQDSHTLAMKKGSGSSPVITVLSNAGSSGSSYTLYLSGSGYSSGTQLMELYTCTSVTVDSSNKIAVPMASGLPRVFVLASSVSNSGLCGSSTPTTTATTATTATQTTTATTTAGGCTQATALPVLFKELVTTSYGQDIYISGSISQLGTWDTSKAVALSADSYTSSNPLWQATITLPVGTTFQYKFIKKANGAITWESDPNRSYTVPTGCSGSTATVTASWK

SEQ ID NO: 141 - protein, 602 aa, Penicillium olsonii
LTPAEWRSQSIYFLLTDRFGRDDNSTTATCNTGDRTYCGGTWQGIINQLDYIQGMGFTAIWITPVTEQLSANTGYGTAYHGYWQQDIYEVNPNHGSSADLKALSAALHARGMYLMVDVVANHMGYNGIGSSVDYSVFNPFSSSSYFHSYCLISNYNDQSNVENCWLGDTTVSLPDLDTTQTAVQTIWNEWITDLVSNYSIDGLRIDTVKHVQKSFWPGFNDAAGVYSVGEIFDGNPSYTCDYQNYLDGVLNYPIYYPLLYAFQSTSGSISDLYNMINTVASDCADSTLLGNFIENHDNPRFPSYTGDYSQAKNVISYLFLSDGIPIIYSGQEQHYSGASDPANREALWLSGYSTTAELYKWIATTNKIRKLAVSADSSYITSKNSPFYQDSHTLGMKKGSVITILSNNGASGSSYTLSLSGSGYSSGTKLMELYTCTSITVDSSGNIPVPMVSGLPRALIPASSIGSNGLCGSTTSPTTTAATQTTTATTTGTCTQATALPVLFKELVTTSYGQNVYISGSISQLGNWDASSAIALSASSYTSSNPLWQVTITLPVGTKFEYKFIEKSSGSATATWESDPNRSYTVPTGCAGTTATVTATWR

SEQ ID NO: 142 - protein, 621 aa, Penicillium vasconiae
LTAAEWRTQSIYFLLTDRFGRTDNSTTATCSVSDRIYCGGSWQGIINHLDYIQGMGFTAIWITPVTEQLSQDTGDGEAYHGYWQQEIYNVNTNYGTAADLLALSKALHSRGMYLMVDVVANHMGYDGAGNTVDYSVFNPFDSSSYFHSYCEISDYSNQTNVEDCWLGDTTVSLPDLDTTLSSVQTIWYNWVTELVSNYSIDGLRIDTVKHVQKSFWPGYNSAAGVYCVGEVFDGDPAYTCPYQSYLDGVLNYPIYYQLLYAFESTSGSISSLYNMINSVASDCSDPTLLGNFIENHDNPRFASYTSDYSQAKNVISFIFFSDGIPIVYAGQEQHYSGGSDPANREATWLSGYDTTATLYKYITSTNKIRSLAISKDTAYITSKNNAFYTDSNTIAMKKGSSGSQVITVLSNRGSSGSSYTLTLSGSGYSSGTQLMEMYTCTAVTVDSSGNIAVPMASGLPRIYMLASSACSICSSSCSTTTTTSTTSTSTTTASTLKTTTSTTSATSTTSTSCTQATALPVLFKEIVTTSYGQNIYISGSISQLGSWDTSNAVALSADQYTSSNNLWYVVVTIPVGTSFEYKFIEETSGSSTITWESDPNRSYTVPTGCAGSTATVTATWR

SEQ ID NO: 143 - protein, 615 aa, Penicillium sp.
LTAAEWRSQSIYFLLTDRFGRTDNSTTATCNVSDRIYCGGSWQGIINHLDYIQGMGFTAIWITPVTEQLSQDTGDGEAYHGYWQQEIYNVNTNYGTAADLLALSKALHSRGMYLMVDVVANHMGYDGAGNTVDYSVFNPFDSSSYFHSYCEITDYSNQTNVEDCWLGDTTVSLPDLNTTLSSVQTIWYDWVAALVSNYSIDGLRIDTVKHVQESFWPEYNSAAGVYCVGEVFDGDPAYTCPYQNYLDGVLNYPIYYQLLYAFESTSGSISDLYNMINSVASDCSDPTLLGNFIENHDNPRFASYTSDYSQAKNVLSFIFFSDGIPIVYAGQEQHYSGGSDPANREATWLSGYDTSAELYTWITSTNKIRSLAVSKDTAYITSKNDAFYTDSNTIAMKKGSGGSQVVTVLSNRGSSGSSYTLTLSGSGYSSGTKLMEMYTCTAVTVDSSGNIAVPMASGLPRVYMLASSACSICSSACSTTTTSSTTSTATTTSTTLKTTTTTTSTSCTQATALPVLFKEIVTTSYGQNIYISGSISELGDWDTSNAVALSADQYTSSNNLWYVVVTIPVGTSFEYKFIEETSGSSSITWESDPNRSYTVPTGCAGSTATVTATWR

SEQ ID NO: 144 - protein, 606 aa, Heterocephalum aurantiacum
LTAAEWRQQSIYFLLTDRFARTDGSTTAACNLSQRAYCGGSWQGIINHLDYIQGMGFTAIWITPVTKQIEASTSDGTAYHGYWQQDIYNINSHYGTADDLRALSSALHSRGMYLMIDVVANHMGYPGAGTSVDYSIFTPFGSSSYFHSYCQITDYDNQSNVENCWLGDNVVSLPDLNTQNSNVRNLWYDWVEELVANYSVDGLRVDTVKHVEKDFWPSYNAAAGVYCVGEVFHGDPAYTCPYQNYMDGVLNYPIYYQLLYAFQSSSGSITDLYNMINSVASDCKDPTTLGNFIENHDNPRFPSYTSDMSQAKSVIAFLFLSDGIPIIYAGQEQHYSGGADPNNREAIWLSGYSTSSTLYQFISSTNSIRKLAISKDSSYLTSRNNPFYTDSNTIAMRKGSSGSQVITVLSNKGSSGNSYTLTLTNHGYSSGAQLTELYTCSSIQVASSGGLAVPMASGLPRVLVPSSWIQGSGLCGGGSTTTTTTATTTTTTTTSTSSCAAATSLAVVFNELVTTYYGENIFIAGSISQLGSWDTGKSVALSASQYTSSNPLWTATVSLPVGTSFQYKFIKKEPDGQVVWESDPNRSYTVPAGCAGTTQTVNTSWR

SEQ ID NO: 145 - protein, 602 aa, Neosartorya massa
LTPAEWRSQSIYFLLTDRFGREDNSTTAACDVTQRLYCGGSWQGIINHLDYIQGMGFTAIWITPVTEQFYEDTGDGTSYHGYWQQNIYEVNYNYGTAQDLKNLADALHARGMYLMVDVVANHMGYDGAGNTVDYSVFTPFDSSSYFHPYCLISDYSNQTNVEDCWLGDTTVSLPDLDTTDTTVRTIWYDWVKGLVANYSIDGLRIDTVKHVEKDFWPGYNDAAGVYCVGEVFSGDPTYTCPYQNYLDGVLNYPIYYQLLYAFESTSGSISNLYDMINSVASDCADPTLLGNFIENHDNPRFASYTSDYSQAKNVISFIFFSDGIPIVYAGQEQHYSGGADPANREAVWLSGYSTSATLYSWIASTNRIRKLAISKDAAYITSKNNPFYYDSNTLAMRKGSIAGAQVITVLSNKGSSGSSYTLSLSGTGYSAGASLVEMYTCTTLTVDSSGNLPVPMASGLPRVLVPSSWVSGSGLCGSGSTTTTTTTATATTTACTSATALPIVFEEVVTTTYGENVYLTGSISQLGNWDTSSAIALSASKYTSSNPEWYVTVTLPVGTSFQYKFFKKESDGSIVWESDPNRSYTVPTGCAGTTVTVSDTWR

SEQ ID NO: 146 - protein, 588 aa, Penicillium janthinellum
ATPAQWRSQSIYFMLTDRFARTDGSTTAPCDTSQRAYCGGTWQGIIDKLDYIQGMGFTAIWITPVTGQLDGDTGDGTAYHGYWQQDIYSLNSNYGTASDLKALASALHARGMYLMVDVVANHMGYNGAGNTVDYSVFDAFNSNQYFHSYCEVTNYSNQTNVEDCWLGDTTVSLPDLNTELSSVQSIWYNWVGSLVSNYSIDGLRVDTVKHVQKDFWPGYNKAAGVYCVGEVFDGDASYTCPYQEVMDGVLNYPMYYPLLRAFQSTSGSMSDLYNMINTVKSTCSDSTLLGTFVENHDNPRFASYTNDMSLAKNVAAFTIMADGIPIIYAGQEQHYSGGSDPANREAVWLSGYNTDSALYKLIAKVNAIRSYAISQSASYVTYKNYPIYQDASTLAMRKGSSGTQTITVLSNRGASGSQYTLSLGNTGYSTGTTLTEIITCAKITVDSSGNVPVPMASGEPRILYPSSSIKGSAICASSGRGATSPGGSSGSVEVTFDVYATTVYGQNIYITGDVSELGNWTPANGVALSSANYPTWSATIALPADTTIQYKYVNIDGSTVIWEDAISNREITTPASGTYTEKDTWDES

SEQ ID NO: 147 - protein, 589 aa, Aspergillus brasiliensis
ATPAEWRSQSIYFLLTDRFARTDNSTTASCDLSARQYCGGSWQGIINQLDYIQGMGFTAIWVTPVTAQIPQDTGYGQAYHGYWQQDAYALNSHYGTADDLKALATALHSRGMYLMVDVVANHMGHNGTGSSVEYSVYNPFNAKKYFHNLCWISNYDNQTNVEDCWLGDNTVALPDLDTTRTDVKNMWYDWVKSLVSNYSVDGLRVDTVKNVQKNFWPGYNNASGVYCIGEVFDGDASYTCPYQDDLDGVLNYPMYYPLLRAFKSTTGSISDLYNMINTVKSTCKDSTLLGTFIENHDNPRFANYTSDMSLAKNVATFTILADGIPIIYAGQEQHYSGGNDPYNREATWLSGYKTTSELYTHIAASNKIRTHAIKQDSGYLTYKNYPIYQDTSTLAMRKGYNGTQTITVLSNLGASGSSYTLSLPGTGYTAGQKITEIYTCTNLTVNSNGSVPVPMKSGLPRILYPTDKLVNGSSFCSSSGRGATSPGGSSGSVEVTFDVYATTVYGQNIYITGDVSELGNWTPANGVALSSANYPTWSATIALPADTTIQYKYVNIDGSTVIWEDAISNREITTPASGTYTEKDTWDES

SEQ ID NO: 148 - protein, 588 aa, Aspergillus westerdijkiae
ATPAQWRSQSIYFLLTDRFARDDGSTTATCNTEDRKYCGGTWQGIIDQLDYIQGMGFTAIWITPVTAQLTEDTKYGDAYHGYWQQDIYSLNENYGTADDLKALADALHERDMYLMVDVVANHMGYAGAGDSVDYSVFNPFNSQDYFHSFCLIQDYNDQTQSEDCWLGDNSVSLPDLDTTKSEVQDIWYDWVGGLVSNYSIDGLRIDTVKHVQKEFWPGYNDAAGVYCIGEILDGDASYTCPYQEVLDGVLNYPIYYPLLNAFKSTSGSISDLYNMINTVKSDCPDSTLMGTFIENHDNPRFASYTDDIALAKNVAAFTILADGIPIVYAGQEQHYAGGEDPANREATWLGKYNTDSELYKLIAASNAIRNHAISTDKEYVNYKNYPIYKDDSTIAMRKGFDGAQIITVLSNQGSSGSSYTLSLGDTGFSSGDKLTEIYTCTAVTVDSDGKVPVPMDGGAPRALFPTEKLSGSSLCSGSGRGATSPGGSSGSVEVTFDVYATTVYGQNIYITGDVSELGNWTPANGVALSSANYPTWSATIALPADTTIQYKYVNIDGSTVIWEDAISNREITTPASGTYTEKDTWDES

SEQ ID NO: 149 - protein, 476 aa, Hamigera avellanea
ATPADWRSRSIYFILTDRFARTDGSTTAECDTSARAYCGGTWRGIINKLDYIQNMGFTAIWITPVTAQLPGSTGHGSAYHGYWQQDIYSLEPNYGTADDLRALASALHERNMYLMVDVVANHMGWAGSGDSVDYSVFNPFDSADYFHPYCLISNYEDQTEVENCWLGDTNVALVDLDTTRSDVQNIWYEWVDSLVGNYSIDGLRIDTVRHVQKDFWPGFNDAAGVYSVGEVFSGDTAYTCPYQEVLDGVLNYPIYYPLLRAFQSTSGSINDLYNMINTVKSDCADSTLMGTFLENHDNPRFASYTSDVALAKNAIAFTILSDGIPIIYAGQEQHYSGGNDPANREAVWLSGYSTDSELYSFVAVTNQIRNYAISQDQGYVTWKNVPIYQDTSTLAMRKGTDGSQVITVLSNLGASGSSYTLTLGGSGYSSGQQLTEIFSCATVTVDSSGNIPVPMGSGQPKVFYPTAGLGGSGICQ

SEQ ID NO: 150 - protein, 586 aa, Hamigera avellanea
ATPADWRSRSIYFILTDRFARTDGSTTAECDTSARAYCGGTWRGIINKLDYIQNMGFTAIWITPVTAQLPGSTGHGSAYHGYWQQDIYSLEPNYGTADDLRALASALHERNMYLMVDVVANHMGWAGSGDSVDYSVFNPFDSADYFHPYCLISNYEDQTEVENCWLGDTNVALVDLDTTRSDVQNIWYEWVDSLVGNYSIDGLRIDTVRHVQKDFWPGFNDAAGVYSVGEVFSGDTAYTCPYQEVLDGVLNYPIYYPLLRAFQSTSGSINDLYNMINTVKSDCADSTLMGTFLENHDNPRFASYTSDVALAKNAIAFTILSDGIPIIYAGQEQHYSGGNDPANREAVWLSGYSTDSELYSFVAVTNQIRNYAISQDQGYVTWKNVPIYQDTSTLAMRKGTDGSQVITVLSNLGASGSSYTLTLGGSGYSSGQQLTEIFSCATVTVDSSGNIPVPMGSGQPKVFYPTAGLGGSGICQSSGATSPGGSSGSVEVTFDVYATTVYGQNIYITGDVSELGNWTPANGVALSSANYPTWSATIALPADTTIQYKYVNIDGSTVIWEDAISNREITTPASGTYTEKDTWDES

SEQ ID NO: 151 - protein, 576 aa, Meripilus giganteus
RPTVFDAGADAHSLHARAPSGSKDVIIQMFEWNWDSVAAECTNFIGPAGYGFVQVSPPQETIQGAQWWTDYQPVSYTLTGKRGDRSQFANMITTCHAAGVGVIVDTIWNHMAGVDSGTGTAGSSFTHYNYPGIYQNQDFHHCGLEPGDDIVNYDNAVEVQTCELVNLADLATDTEYVRGRLAQYGNDLLSLGADGLRLDASKHIPVGDIANILSRLSRSVYITQEVIFGAGEPITPNQYTGNGDVQEFRYTSALKDAFLSSGISNLQDFENRGWVPGSGANVFVVNHDTERNGASLNNNSPSNTYVTATIFSLAHPYGTPTILSSYDGFTNTDAGAPNNNVGTCSTSGGANGWLCQHRWTAIAGMVGFRNNVGSAALNNWQAPQSQQIAFGRGALGFVAINNADSAWSTTFTTSLPDGSYCDVISGKASGSSCTGSSFTVSGGKLTATVPARSAIAVHTGQKGSGGATPTSAPSTTPTSGTVSMTFAEQATTTFGENIFLVGSISQLGNWNPASAIALSSAAYPTWSVSVNIPAGTTFQYKFIRKETDGSVVWESDPNRQATAPASGTTTLTSSWR

SEQ ID NO: 152 - protein, 575 aa, Cerrena unicolor
RPLNASNALDARAPSGAKSVIIQMFEWTWDSVAAECTNFIGPAGYGFVQVSPPQETIQGDQWWTDYQPVSYILTSKRGTRDQFAAMIDTCHDAGVKVIVDTIWNHMAGVESGTGVAGSSFTHYNYPGIYQNQDFHHCGLESGDDIVNYDNAQEVQTCELVNLADLATETDYVRGRLAEYGNDLLSLGADGLRLDAAKHIAVGDLANIIGRLNSTPYITQEVIFGSGEPITPNQYTGNGDVQKFRYTSALKDAFLNGDISSLQDFENRGWVAGSGANVFVTNHDTERNGNSLNNNSPNNAYTLAMIFSLAHPYGTPSILSSYSGFTDTDAGAPNGGAGTCSGSGGSNGWLCQHRWTAVAGMVGFRNTVGSAALNNWVSPQSSQIAFGRGALGFVAINNGDSTWSTTFTTSLPDGTYCDVITGTSSSGSCTGSSFTVSGGTFTANVAARDAVAIHTGATGTGSGSGNTSTGSGGTTSDTVSVSFAETATTTFGENIFLVGSISQLGAWDPASAIALSSASYPTWTVTVTLPAGTTFEYKFIRKETDGSVVWESDPNRQATTPSSSDAATTTLSTSWR

SEQ ID NO: 153 - protein, 562 aa, Physalacria cryptomeriae
APFLELQVRAPSSTKQVIIQMFEWTWDSVAAECTDFIGPAGYGYVQVSPPAEHITGDQWWTDYQPVSYILTSKRGNRSQFANMVTTCHTAGVLVIADALFNHMAGIESGTGTAGSSFTHYDYPGIYQTQDFHHCGLTSGDDISDYSSQAQVQTCELVNLADLATDTEYVRAKLASYANDLISLGVNGLRLDAAKHIATDDIKNILSRLSSTVYITQEVIFGSGEPVTPSMYTQNGDVQEFRYTSTLQSAFSGGDISQLQNLDSKGWIAGTSANVFVANHDTERGGSSLNYKSSSNTYVTATIFSLAHPYGTPTILSSYEFSDTDAGSPNGGAGTCSTTGGANGWLCQHRWVAFSGMVGFHNNVGTASLTNWVSPQSNQIAFERSGKGFVAINNADSAWTATFTTSLAAGSYCDVITGTSNGSACSGTSYTVSGGSFSATVAARSAVAIHTGATGSGSGGGGGSTGSVAITFQETATTTLGENIFLVGSISQLRTWAPASAIALSSASYPTWSVTVSIPAGTTFEYKFIRKESDGSVVWESDPNRSATASSSASTQTILTSWR

SEQ ID NO: 154 - protein, 578 aa, Lenzites betulinus
RPASTVFHGAETRSLDARAPSGSKDVIIQMFEWTWDSVAAECTNFIGPAGYGFVQGSPPQEHIQGAQWWTDYQPVSYTLTSKRGDRTSFANMIQTCHTAGVGVIVDTLFNHMAGVDSGTGVAGSSFTHYNYPGIYQNQDFHHCGLEPGDDIVNYDNAVEVQTCELDNLADLATETEYVRGRLAQYGNDLLSLGADGMRLDAAKHIAVGDIANILSRLNRTVYITQEVIFGAGEPITPNQYTGNGDVQEFRYTSALQDAFLNSGIANLQVLENRGWVPGSGANVFVTNHDTERNGASLNNNSPSNTYVTAMIFSLAHPFGTPSILSSYSGFTDTDAGAPNGGVGTCSGSGGTNGWLCQHRWTAVAGMVGFRNQVGSAALGNWQSPQSQQIAFGRGALGFVAINNADSAWSATFTTSLPDGSYCDVISGQTSGSTCTGSSFTVSGGSLSATVPARSAIAVHTGQKGTGSGSGTGTGGGGSTGSGNVAVNFAETATTTFGENIFVVGSISQLGTWNTANAIALSSPSYPTWTVSISIPAGTTFQYKFIRKETDGSVVWESDPNRQATAPASGSTTLSTSWR

SEQ ID NO: 155 - protein, 571 aa, Trametes ljubarskyi
RPATFDAADARSVQPRAPSGSKDVIIQMFEWTWDSVAAECTNFIGPAGYGFVQGNPPQEHIQGDQWWTDYQPVSYILTSKRGDRTAFANMISTCHAAGVGVIVDTIFNHMSGVDSGTGVAGSSFTHYNYPGIYQNQDFHHCGLEPGDDIVNYDNAVEVQTCELENLADLATDTEYVRGRLAQYANDLLSLGADGLRLDAAKHIPTGDIANILSRLNRSVYITQEVIYGDGEPITPNQYTGNGDVQEFRYTTALKNAFLGGGISSLQSFDNLGWVPGTGANVFVTNHDTERNGNSLNNNSPSNTYVTAMIFSLAHPYGTPTILSSYSGFTNTDAGAPNGGTGTCSGSGGANGWLCQHRWTAVAGMVGFRNNVGSAALTNWQSPQSQQIAFGRGALGFVAINNADSAWSTTFTTSLPDGSYCDVVSGTSSNGGCTGSSFSVSGGSLTATVPARSAIAIHTGETGSGSNSGGGSGGSGTVTINFAETATTTFGENIFVVGSIPQLGSWNPANAIALSSASYPTWTVSVSVPAGTTFEYKFIRKETDGSVVWESDPNRSDTAPASGTQTITTSWR

SEQ ID NO: 156 - protein, 451 aa, Bacillus subtilis
GPAAASAETANKSNELTAPSIKSGTILHAWNWSFNTLKHNMKDIHDAGYTAIQTSPINQVKEGNQGDKSMSNWYWLYQPTSYQIGNRYLGTEQEFKEMCAAAEEYGIKVIVDAVINHTTFDYAAISNEVKSIPNWTHGNTQIKNWSDRWDVTQNSLLGLYDWNTQNTQVQSYLKRFLERALNDGADGFRFDAAKHIELPDDGSYGSQFWPNITNTSAEFQYGEILQDSASRDAAYANYMDVTASNYGHSIRSALKNRNLGVSNISHYAYDVSADKLVTWVESHDTYANDDEESTWMSDDDIRLGWAVIASRSGSTPLFFSRPEGGGNGVRFPGKSQIGDRGSALFEDQSITAVNRFHNVMAGQPEELSNPNGNNQIFMNQRGSHGVVLANAGSSSVSINTPTKLPDGRYDNKAGAGSFQVNDGKLTGTINARSVAVLYPDDIEIRCNTFFQ

SEQ ID NO: 157 - protein, 633 aa, Bacillus subtilis
GPAAASAETANKSNELTAPSIKSGTILHAWNWSFNTLKHNMKDIHDAGYTAIQTSPINQVKEGNQGDKSMSNWYWLYQPTSYQIGNRYLGTEQEFKEMCAAAEEYGIKVIVDAVINHTTSDYAAISNEVKSIPNWTHGNTQIKNWSDRWDVTQNSLLGLYDWNTQNTQVQSYLKRFLDRALNDGADGFRFDAAKHIELPDDGSYGSQFWPNITNTSAEFQYGEILQDSASRDAAYANYMDVTASNYGHSIRSALKNRNLGVSNISHYASDVSADKLVTWVESHDTYANDDEESTWMSDDDIRLGWAVIASRSGSTPLFFSRPEGGGNGVRFPGKSQIGDRGSALFEDQAITAVNRFHNVMAGQPEELSNPNGNNQIFMNQRGSHGVVLANAGSSSVSINTATKLPDGRYDNKAGAGSFQVNDGKLTGTINARSVAVLYPDDIAKAPHVFLENYKTGVTHSFNDQLTITLRADANTTKAVYQINNGPETAFKDGDQFTIGKGDPFGKTYTIMLKGTNSDGVTRTEKYSFVKRDPASAKTIGYQNPNHWSQVNAYIYKHDGSRVIELTGSWPGKPMTKNADGIYTLTLPADTDTTNAKVIFNNGSAQVPGQNQPGFDYVLNGLYNDSGLSGSLPH

SEQ ID NO: 158 - protein, 487 aa, Schwanniomyces occidentalis; identical to SEQ ID NO: 79

SEQ ID NO: 159 - protein, 583 aa, Rhizomucor pusillus
ATSDDWKGKAIYQLLTDRFGRADDSTSNCSNLSNYCGGTYEGITKHLDYISGMGFDAIWISPIPKNSDGGYHGYWATDFYQLNSNFGDESQLKALIQAAHERDMYVMLDVVANHAGPTSNGYSGYTFGDASLYHPKCTIDYNDQTSIEQCWVADELPDIDTENSDNVAILNDIVSGWVGNYSFDGIRIDTVKHIRKDFWTGYAEAAGVFATGEVFNGDPAYVGPYQKYLPSLINYPMYYALNDVFVSKSKGFSRISEMLGSNRNAFEDTSVLTTFVDNHDNPRFLNSQSDKALFKNALTYVLLGEGIPIVYYGSEQGFSGGADPANREVLWTTNYDTSSDLYQFIKTVNSVRMKSNKAVYMDIYVGDNAYAFKHGDALVVLNNYGSGSTNQVSFSVSGKFDSGASLMDIVSNITTTVSSDGTVTFNLKDGLPAIFTSATGGTTTTATPTGSGSVTSTSKTTATASKTSTSTSSTSCTTPTAVAVTFDLTATTTYGENIYLVGSISQLGDWETSDGIALSADKYTSSDPLWYVTVTLPAGESFEYKFIRIESDDSVEWESDPNREYTVPQACGTSTATVTDTWR

SEQ ID NO: 160 - protein, 616 aa, Aspergillus niger
AEWRTQSIYFLLTDRFGRTDNSTTATCDTGDQIYCGGSWQGIINHLDYIQGMGFTAIWISPITEQLPQDTADGEAYHGYWQQKIYDVNSNFGTADDLKSLSDALHARGMYLMVDVVPNHMGYAGNGNDVDYSVFDPFDSSSYFHPYCLITDWDNLTMVQDCWEGDTIVSLPDLNTTETAVRTIWYDWVADLVSNYSVDGLRIDSVLEVEPDFFPGYQEAAGVYCVGEVDNGNPALDCPYQKVLDGVLNYPIYWQLLYAFESSSGSISNLYNMIKSVASDCSDPTLLGNFIENHDNPRFASYTSDYSQAKNVLSYIFLSDGIPIVYAGEEQHYSGGKVPYNREATWLSGYDTSAELYTWIATTNAIRKLAISADSAYITYANDAFYTDSNTIAMRKGTSGSQVITVLSNKGSSGSSYTLTLSGSGYTSGTKLIEAYTCTSVTVDSSGDIPVPMASGLPRVLLPASVVDSSSLCGGSGRTTTTTTAATSTSKATTSSSSSSAAATTSSSCTATSTTLPITFEELVTTTYGEEVYLSGSISQLGEWDTSDAVKLSADDYTSSNPEWSVTVSLPVGTTFEYKFIKVDEGGSVTWESDPNREYTVPECGNGSGETVVDTWR

SEQ ID NO: 161 - protein, 512 aa, Bacillus stearothermophilus
APFNGTMMQYFEWYLPDDGTLWTKVANEANNLSSLGITALWLPPAYKGTSRSDVGYGVYDLYDLGEFNQKGTVRTKYGTKAQYLQAIQAAHAAGMQVYADVVFDHKGGADGTEWVDAVEVNPSDRNQEISGTYQIQAWTKFDFPGRGNTYSSFKWRWYHFDGVDWDESRKLSRIYKFRGKAWDWEVDTEFGNYDYLMYADLDMDHPEVVTELKNWGKWYVNTTNIDGFRLDAVKHIKFSFFPDWLSYVRSQTGKPLFTVGEYWSYDINKLHNYITKTDGTMSLFDAPLHNKFYTASKSGGAFDMRTLMTNTLMKDQPTLAVTFVDNHDTEPGQALQSWVDPWFKPLAYAFILTRQEGYPCVFYGDYYGIPQYNIPSLKSKIDPLLIARRDYAYGTQHDYLDHSDIIGWTREGGTEKPGSGLAALITDGPGGSKWMYVGKQHAGKVFYDLTGNRSDTVTINSDGWGEFKVNGGSVSVWVPRKTTVSTIARPITTRPWTGEFVRWTEPRLVAWP

SEQ ID NO: 162 - protein, 483 aa, Bacillus halmapalus
HHNGTNGTMMQYFEWHLPNDGNHWNRLRDDASNLRNRGITAIWIPPAWKGTSQNDVGYGAYDLYDLGEFNQKGTVRTKYGTRSQLESAIHALKNNGVQVYGDVVMNHKGGADATENVLAVEVNPNNRNQEISGDYTIEAWTKFDFPGRGNTYSDFKWRWYHFDGVDWDQSRQFQNRIYKFRGKAWDWEVDSENGNYDYLMYADVDMDHPEVVNELRRWGEWYTNTLNLDGFRIDAVKHIKYSFTRDWLTHVRNATGKEMFAVAEFWKNDLGALENYLNKTNWNHSVFDVPLHYNLYNASNSGGNYDMAKLLNGTVVQKHPMHAVTFVDNHDSQPGESLESFVQEWFKPLAYALILTREQGYPSVFYGDYYGIPTHSVPAMKAKIDPILEARQNFAYGTQHDYFDHHNIIGWTREGNTTHPNSGLATIMSDGPGGEKWMYVGQNKAGQVWHDITGNKPGTVTINADGWANFSVNGGSVSIWVKR

SEQ ID NO: 163 - protein, 478 aa, Aspergillus oryzae
ATPADWRSQSIYFLLTDRFARTDGSTTATCNTADQKYCGGTWQGIIDKLDYIQGMGFTAIWITPVTAQLPQTTAYGDAYHGYWQQDIYSLNENYGTADDLKALSSALHERGMYLMVDVVANHMGYDGAGSSVDYSVFKPFSSQDYFHPFCFIQNYEDQTQVEDCWLGDNTVSLPDLDTTKDVVKNEWYDWVGSLVSNYSIDGLRIDTVKHVQKDFWPGYNKAAGVYCIGEVLDGDPAYTCPYQNVMDGVLNYPIYYPLLNAFKSTSGSMDDLYNMINTVKSDCPDSTLLGTFVENHDNPRFASYTNDIALAKNVAAFIILNDGIPIIYAGQEQHYAGGNDPANREATWLSGYPTDSELYKLIASANAIRNYAISKDTGFVTYKNWPIYKDDTTIAMRKGTDGSQIVTILSNKGASGDSYTLSLSGAGYTAGQQLTEVIGCTTVTVGSDGNVPVPMAGGLPRVLYPTEKLAGSKICSSS

SEQ ID NO: 164 - protein, 483 aa, Bacillus amyloliquefaciens
VNGTLMQYFEWYTPNDGQHWKRLQNDAEHLSDIGITAVWIPPAYKGLSQSDNGYGPYDLYDLGEFQQKGTVRTKYGTKSELQDAIGSLHSRNVQVYGDVVLNHKAGADATEDVTAVEVNPANRNQETSEEYQIKAWTDFRFPGRGNTYSDFKWHWYHFDGADWDESRKISRIFKFRGEGKAWDWEVSSENGNYDYLMYADVDYDHPDVVAETKKWGIWYANELSLDGFRIDAAKHIKFSFLRDWVQAVRQATGKEMFTVAEYWQNNAGKLENYLNKTSFNQSVFDVPLHFNLQAASSQGGGYDMRRLLDGTVVSRHPEKAVTFVENHDTQPGQSLESTVQTWFKPLAYAFILTRESGYPQVFYGDMYGTKGTSPKEIPSLKDNIEPILKARKEYAYGPQHDYIDHPDVIGWTREGDSSAAKSGLAALITDGPGGSKRMYAGLKNAGETWYDITGNRSDTVKIGSDGWGEFHVNDGSVSIYVQK

SEQ ID NO: 165 - protein, 583 aa, Rhizomucor pusillus; identical to SEQ ID NO: 130

SEQ ID NO: 166 - protein, 623 aa, Kionochaeta ivoriensis
LSPAGWRQQSIYQVMTDRFARTDGSTIASCDTSQQAYCGGTWQGLINKLDYIQGMGFTAVWISPMVHQMAGATSDGESYHGYWAQDINTVNSAFGTAADLKALSAALHARGMYLMLDVVTNHFAYDGCGTCVDYSIFNPFNSESYFHPFCLIDYSNTTSIQVCWEGDNTVSLPDLRTEDSDVRSIWNSWISSVISTYGVDGLRVDSAQQVETSFWAGFEAAAGVYMVGEVFNGDPTYVTPFQDYMDGVLNYPAYYWITQAFESTSGSISNLANGMNTMKSLAKNTSLLGSFLENHDNPRFPSLTSDMSLAQNAIAFTMLMDGIPIIYQGQEQHFSGGGVPSDREAVWLSGYPNDTTLYAWITKLNAVRSWAIAKDSSYLAYMAYPVYTDTHTIAMRKGDTGYQVISVYTNVGASGSSYSVTLTSADTGFTASQSVVDLVGCKTYTADSTGSLSLSLTGGIPIILYPAASLTGNTICTSTGGTTTTATPTGSGSVTSTSKTTATASKTSTSTSSTSCTTPTAVAVTFDLTATTTYGENIYLVGSISQLGDWETSDGIALSADKYTSSDPLWYVTVTLPAGESFEYKFIRIESDDSVEWESDPNREYTVPQACGTSTATVTDTWR

SEQ ID NO: 167 - protein, 588 aa, Aspergillus niger
LSAAEWRTQSIYFLLTDRFGRTDNSTTATCDTGDQIYCGGSWQGIINHLDYIQGMGFTAIWISPITEQLPQDTADGEAYHGYWQQKIYDVNSNFGTADDLKSLSDALHARGMYLMVDVVPNHMGYAGNGNDVDYSVFDPFDSSSYFHPYCLITDWDNLTMVQDCWEGDTIVSLPDLNTTETAVRTIWYDWVADLVSNYSVDGLRIDSVLEVEPDFFPGYQEAAGVYCVGEVDNGNPALDCPYQKVLDGVLNYPIYWQLLYAFESSSGSISNLYNMIKSVASDCSDPTLLGNFIENHDNPRFASYTSDYSQAKNVLSYIFLSDGIPIVYAGEEQHYSGGKVPYNREATWLSGYDTSAELYTWIATTNAIRKLAISADSAYITYANDAFYTDSNTIAMRKGTSGSQVITVLSNKGSSGSSYTLTLSGSGYTSGTKLIEAYTCTSVTVDSSGDIPVPMASGLPRVLLPASVVDSSSLCGGSGRGATSPGGSSGSVEVTFDVYATTVYGQNIYITGDVSELGNWTPANGVALSSANYPTWSATIALPADTTIQYKYVNIDGSTVIWEDAISNREITTPASGTYTEKDTWDES

SEQ ID NO: 168 - protein, 588 aa, Aspergillus oryzae
ATPADWRSQSIYFLLTDRFARTDGSTTATCNTADQKYCGGTWQGIIDKLDYIQGMGFTAIWITPVTAQLPQTTAYGDAYHGYWQQDIYSLNENYGTADDLKALSSALHERGMYLMVDVVANHMGYDGPGSSVDYSVFVPFNSASYFHPFCFIQNWDNQTQVEDCWLGDNTVSLPDLDTTKDVVKNEWYDWVGSLVSNYSIDGLRIDTVKHVQKDFWPGYNKAAGVYCIGEVLDGDPAYTCPYQEVLDGVLNYPIYYPLLNAFKSTSGSMDDLYNMINTVKSDCPDSTLLGTFVENHDNPRFASYTNDIALAKNVAAFIILNDGIPIIYAGQEQHYAGGNDPANREATWLSGYPTDSELYKLIASANAIRNYAISKDTGFVTYKNWPIYKDDTTIAMRKGTDGSQIVTILSNKGASGDSYTLSLSGAGYTAGQQLTEVIGCTTVTVDSSGDVPVPMAGGLPRVLYPTEKLAGSKICSSSGRGATSPGGSSGSVEVTFDVYATTVYGQNIYITGDVSELGNWTPANGVALSSANYPTWSATIALPADTTIQYKYVNIDGSTVIWEDAISNREITTPASGTYTEKDTWDES

SEQ ID NO: 169 - protein, 583 aa, Penicillium canescens
LTPAEWRSQSIYFMLTDRFGRSDNSTTAACNVSDRTYCGGTWQGIINHLDYIQGMGFTAIWITPVTEQLPQDTGDGEAYHGYWQQNIYEIDSKLGTAADLLALSKALHARGMYLMVDVVANHMGYAGSGNSVDYSVFNPFSSSSYFHSYCLISNYDDQSNVENCWLGDTIVSLPDLDTTQTAVQTIWYDWIADLVSNYSIDGLRIDTVKHVQKSFWPGYNDAAGVYCVGEIFDGDPAYTCDYQNYMDGVLNYPIYYQLLYAFQSSSGSISDLYNMINSVKSDCADSTLLGNFIENHDNPRFASYTSDYSQAKNVISFLFLSDGIPIIYSGQEQHYSGGADPANREATWLSGYSTTAELYKYIATTNKIRKLAVSDSSYLTTKNVPFYQDSHTLAMKKGSSASPVITVLSNYGSSGSSYTLSLSGSGYSSGTKLMEMYTCTSVTVDSSGNIAVPMASGLPRVLMLASSANSLCGSSGATSPGGSSGSVEVTFDVYATTVYGQNIYITGDVSELGNWTPANGVALSSANYPTWSATIALPADTTIQYKYVNIDGSTVIWEDAISNREITTPASGTYTEKDTWDES

SEQ ID NO: 170 - protein, 583 aa, Acidomyces acidothermus
LTPAQWRGQSIYQVLTDRFGRTDDSTTAACDVNDYCGGSWQGIINHLDYIQDMGFSAIWISPVVENLVGDTQDGSAYHGYWAQNIYALNPNFGTVSDLVALSAALHQRGMYLMVDVVTNHMGYDGCGDCVDYSVFTPFNSQSYFHPFCLIDYNNSTSIKVCWEGDNIVSLPDMRTEDSDVATEWNTWISELVSNYSIDGLRIDSAQQVDNAFFPPFQAAAGGIHVLGEVFNGDPNYVCPYQDFMSGVLNYPAYYYITQAFQSTSGSISNLVNGINQMKSTCTDTTLLGSFLENHDNPRFPSYTSDLSLDKNAITFTILQDGIPIIYEGQEQHYSGGTVPNNREAIWLSGYDKSAPLYTWIASVNQIRNQAIFKDSNYLTYMAWPIYSDASTIAMRKGFDGLQIISVYSNKGASAASYTISLESSTTGFTANEALVEVMSCTTYTTDGSGNLAVTISGGLPAVFYPKAQLAGSGICGATSPGGSSGSVEVTFDVYATTVYGQNIYITGDVSELGNWTPANGVALSSANYPTWSATIALPADTTIQYKYVNIDGSTVIWEDAISNREITTPASGTYTEKDTWDES

SEQ ID NO: 171 - protein, 586 aa, Kinochaeta ivoriensis
LSPAGWRQQSIYQVMTDRFARTDGSTIASCDTSQQAYCGGTWQGLINKLDYIQGMGFTAVWISPMVHQMAGATSDGESYHGYWAQDINTVNSAFGTAADLKALSAALHARGMYLMLDVVTNHFAYDGCGTCVDYSIFNPFNSESYFHPFCLIDYSNTTSIQVCWEGDNTVSLPDLRTEDSDVRSIWNSWISSVISTYGVDGLRVDSAQQVETSFWAGFEAAAGVYMVGEVFNGDPTYVTPFQDYMDGVLNYPAYYWITQAFESTSGSISNLANGMNTMKSLAKNTSLLGSFLENHDNPRFPSLTSDMSLAQNAIAFTMLMDGIPIIYQGQEQHFSGGGVPSDREAVWLSGYPNDTTLYAWITKLNAVRSWAIAKDSSYLAYMAYPVYTDTHTIAMRKGDTGYQVISVYTNVGASGSSYSVTLTSADTGFTASQSVVDLVGCKTYTADSTGSLSLSLTGGIPIILYPAASLTGNTICTSGATSPGGSSGSVEVTFDVYATTVYGQNIYITGDVSELGNWTPANGVALSSANYPTWSATIALPADTTIQYKYVNIDGSTVIWEDAISNREITTPASGTYTEKDTWDES

SEQ ID NO: 172 - protein, 585 aa, Aspergillus terreus
LTPAEWRSQSIYFLLTDRFGRTDNSTTAACDTSDRVYCGGSWQGIINQLDYIQGMGFTAIWITPVTGQFYENTGDGTSYHGYWQQDIYDLNYNYGTAQDLKNLANALHERGMYLMVDVVANHMGYDGAGNTVDYSVFNPFSSSSYFHPYCLISNYDNQTNVEDCWLGDTTVSLPDLDTTSTAVRNIWYDWVADLVANYSIDGLRVDTVKHVEKDFWPGYNSAAGVYCVGEVYSGDPAYTCPYQNYMDGVLNYPIYYQLLYAFESSSGSISDLYNMISSVASSCKDPTLLGNFIENHDNPRFASYTSDYSQAKNVITFIFLSDGIPIVYAGQEQHYSGGSDPANREATWLSGYSTSATLYTWIATTNQIRSLAISKDAGYVQAKNNPFYSDSNTIAMRKGTTAGAQVITVLSNKGASGSSYTLSLSGTGYSAGVTLVETYTCTTVTVDSSGNLPVPMTSGLPRVFVPSSWVNGSALCNGATSPGGSSGSVEVTFDVYATTVYGQNIYITGDVSELGNWTPANGVALSSANYPTWSATIALPADTTIQYKYVNIDGSTVIWEDAISNREITTPASGTYTEKDTWDES

SEQ ID NO: 173 - protein, 565 aa, Thamnidium elegans
VPLSVLDKRNGVTTLSKRAAAADWKSRSIYQLVTDRFGRSDGSTSACGDLSNYCGGDYKGIQNQLDYIAGMGFDAIWISPIPENTDGGYHGYWAKDFEKLNTNFGSADDLKALVTAAHGKGMYVMLDVVANHAGPASGGDYSGFTFSSASNYHPQCTIDYDNQTSVEQCWVADDLPDINTEDDTIVSKLHSIVSDWVTTYDFDGIRIDTVKHIRKDFWSGYEEAAGVFATGEVFDGDAAYVGPYQDQLSSLINYPLYYAIRDVFSAGSGFSRISDMLSTIKSNFKDPSVLTTFVDNQDNARFLSVKSDMSLYKNALAFTILTEGIPVVYYGTEQGFKGGDDPKNREVLWTSNYDTSSDLYKFIKIVNNDVRQKSDKTVTLDVDVGTNTYAFTHGKNLIVVNNYGSGSTESVTVKVGDSVADGTKLVDAVSNITATVSGGSITFSLKDGLPALFVPSSGATSPGGSSGSVEVTFDVYATTVYGQNIYITGDVSELGNWTPANGVALSSANYPTWSATIALPADTTIQYKYVNIDGSTVIWEDAISNREITTPASGTYTEKDTWDES

SEQ ID NO: 174 - protein, 574 aa, Meripilus giganteus
RPTVFDAGADAHSLHARAPSGSKDVIIQMFEWNWDSVAAECTNFIGPAGYGFVQVSPPQETIQGAQWWTDYQPVSYTLTGKRGDRSQFANMITTCHAAGVGVIVDTIWNHMAGVDSGTGTAGSSFTHYNYPGIYQNQDFHHCGLEPGDDIVNYDNAVEVQTCELVNLADLATDTEYVRGRLAQYGNDLLSLGADGLRLDASKHIPVGDIANILSRLSRSVYITQEVIFGAGEPITPNQYTGNGDVQEFRYTSALKDAFLSSGISNLQDFENRGWVPGSGANVFVVNHDTERNGASLNNNSPSNTYVTATIFSLAHPYGTPTILSSYDGFTNTDAGAPNNNVGTCSTSGGANGWLCQHRWTAIAGMVGFRNNVGSAALNNWQAPQSQQIAFGRGALGFVAINNADSAWSTTFTTSLPDGSYCDVISGKASGSSCTGSSFTVSGGKLTATVPARSAIAVHTGQKGSGGGATSPGGSSGSVEVTFDVYATTVYGQNIYITGDVSELGNWTPANGVALSSANYPTWSATIALPADTTIQYKYVNIDGSTVIWEDAISNREITTPASGTYTEKDTWDES

SEQ ID NO: 175 - protein, 671 aa, Chaetomium megalocarpum
LYINGSVTAPCDSPIYCQGEILKAIELARPFSDSKTFVDMPTIKPVDEVIAAFSRLSQPLSNNSELTAFLAENFAPAGGELEEVPISELETDPSFLNKLEDVDIKEFVGKVIDIWPDLTRRYAGPGNCSQCANSFIPVNRTFVVAGGRFREPYYWDSYWILEGLLRTGGAFTQISKNMIENFLDFVETIGFVPNGARIYYLNRSQPPLLTLMVKTYVDYTNDTSILERALPLLVKEYEFWTNNRTVSITATDGKEYTLNRYSVNNNQPRPESYREDYVTANNASYYAQSGIIYPVKTPLNETEKAELYSNLASGAESGWDYTARWLKTPDDAARDVYFPLRSLNVRSIVSVDLNSILYQNEVIISEYLEQAGNSSEAKRFADAAEQRSEAMYALMWNATHWSYFDYNLTDNSQRVFVPADADTAPSDQTAAPPGQQVLFDIAQLYPFWTGAAPASLKANPLAVQNAYARVARMLDTKAGAIAATNLRTGQQWDQPNVWPPLQHILMKGLLNTPATFGTEDPAYAHTQDLALRLAQRYLDSTFCTWYATGGSTSATPQLQGAAPGATGTMFEKYADDATNVAGGGGEYEVVEGFGWTNGVLIWAADVFGDRLVRPDCGNITAAHTHSSEKRTVAGASRPDAGASGVRRERRAVELDPWDAAWTKMFGRSKLR

SEQ ID NO: 176 - protein, 662 aa, Lecanicillium psalliotae
LYQNGSVIAPCDSPIYCHGDILKEVELARPFTDSKTFVDMPAKKPLAEIQAAFDKLEKPLSNNTALNEFLSTYFEDAGGELKAVSKDKLKTDAKFVDKLNDTVIKEFVNKVIDIWPDLTREYAGSATNCTNCPNSFIPVNRTFVVAGGRFREPYYWDSYWIVEGLLRTGGAFVDITKNTIENFLDLIEQFGFIPNGARLYYLNRSQPPLLSQMVKNYISYTNDTDILKRALPILVKEHEFFMNNRSVEITVENKTYTLNRYAVSNTQPRPESFREDYNTVNNNSYYAASGIIYPVKTPLNESEQATLYANLASGAESGLDYTTAKWSTNPRDSMEDIYFPLRSLNIMNIVPVDLNSILYGNEKAISEFYNITGNSSEADSWSKKAAERQEAIQAVFWNETLYSYFDYNRTSSSQHIYIPSDDDTQSFENATAPAGMQEVFTVTQFYPFWMGAAPDYIRNNPHAVKTAYSRIAKYLELKPGGIPSSNLRSGQQWDQPSVWPPLMHVLMKGLVNTPATFGKEDPAYKDVHKLALTLGQRYLDSTFCTWYATGGSTSETPQLSGLSDSDVGIMFEKYDDTSINHAGGGGEYEVVEGFGWSNGVLMWVADTFGNELKRPDCGNITAANVHPGKRSVSAVELSSRDAQRVKKFGRRAEGRMKVPGVL

SEQ ID NO: 177 - protein, 637 aa, Doratomyces sp.
LYTNGSIIAPCDSPIYCHGDILHQVQLAHPFPDSKTFVDMPAIKSVDEIQAAFDKLDKPLKNDTALQNFLAENFAEAGHELAEVDPSELSTDPRFLDKVSDTVIHEFTQKVIDIWPDLTRSYSPSGAGSDCPDCPNSFLPVNRTFVVAGGRFREPYYWDSYWIVEGLLRTGGDFLGVSRNIIENFLDFVDDFGFVPNGARRYYLNRSQPPLLSLMVKSYVEQTNDTEILDRAVPLLIKEYEFWTKNRTVEVPFGNETITLNQYNVDNTQPRPESYREDYITATNASYYSASGEVYEEVEKLNETQRATVYRNLATGAESGWDYTSRWMARPRDAVEDVYFPLRSLNIIEIVPVDLNSILYANELAIAEFVRLAGADDCEEEAAAWEALAEKRSADMHRLMWNDTLHSYFDYNLTSSSQNVYVPADNDTAPFERPGGTPEGSQVFFSAAQFYPFWTGAAPSSLRDDPAAVQLAYSRVASYLDLRAGGIPATNLRTGQQWDQPSVWPPLMHILTSGLLNTSPASASDDDDPSYAPTRDLALSLAQRYLDSTFCTWYATGGSTSETPQLDGFTDEDKGAMFEKYDDSATNVAGGGGEYEVVEGFGWTNGVLIWMVDTFGDELSRPDCGDIEAANAHPARK

SEQ ID NO: 178 - protein, 601 aa, Mucor moelleri
IQNHTSFSCDSPIYCEGDILHTVQLAKIFSDSKTFVDMPTSKSESQVIEAFKAIGGRNATIAQVQQFLNENFLTAGTEVKRLTNITIPELNWIDNITDPDYRGWISKLNQAWSNLTFTFDTSVLCQDCATSTLPVSRPFVVPGGRFREFYYWDSFFVIKGLLLSDQVELAKNMILNFFDFIDTYGFIPNGARIYYLNRSQPPFLTQMVEAFWEKTSDKEFMTNALPFLDKEYNFWMTNNSISVPDPKNPSKKYKMNHYVTLNTSPRPESYVEDYNTVNNGTDYSQAVKLQLYADIAAGAETGWDYSSRWTRQKHPAPNQTEGYEMLRSINTANIVPIDLNSLLWNTETMLAEWHDRFGEKSKSKKKSAYYQTQAKKRLDAMEKLMWNPTDYTYYDYNLTSSSQNLEFTPANLFPIWLGALPNKVMKNKTELARVFDETENALRKYPGILTTSYYNTTMQWDWPNGWPPLSYVAMEGMNKVEESLNGKKGSKQDGKTYTTSRGTSLARLSFTLAERYAASAYCGWYKTGGSIPGILNKIDGVADDGHMFEKFDVNTIGISGSQGEYVSQTGFGWTNGIALWIFDTYANLTAPDCNQTITLNI

SEQ ID NO: 179 - protein, 650 aa, Phialophora cyclaminis
LYINGSVIAPCDSPIYCHGELLKAIELARPFSDSKTFVDMPTRKPVDEVVAAFEKLSKPVVNDTKLGEFLQANFLPAGGDLSDFPPGSLETDPKFLDNINDTVIREFTEAVIDIWPDLTRRYVGASNCTGCANSFIPVNRTFVVAGGRFREPYYWDSYWIIEGLLRTGGNFVQISKNIIENFLDFVETIGFVPNGARIYYLNRSQPPLLTAMVKAYLEHTNDTKILDRAVPLLIKEYNFWITNRSVTLTGPDGNEYTLQRYSVNNNQPRPESYREDYNTANNKSYYSTSGIIYPENVSLNDSEKKELYANLATGAESGWDYGTRWLSRPADALRDVYFPLRYVKTRDLVPVDLNAILYQNEASISSFLYIQGNDTGAAHFAKLAAARQKAMTAVLWNATLFSYFDYNMTSSSHFSFIPVDDDATSIETATAPRGFQQIFHVAQLYPFWTGAAPASLRENPLAVQRAFSRVSQMLEEKAGSIPATNFYTGQQWDEPNVWPPLQHIIMEGLRNTPATFGEDDPIYQGVQDLALRVAQRYLDSTFCTWYATGGSTSLTPKLAGLTDNAKGIMFEKYGDNSTNVAGGGGEYEVVEGFGWTNGVLIWAVDTFGNKLKRPDCGDIQPAHVEARGLQRRAVELDKWDAQWVKRFGAK

SEQ ID NO: 180 - protein, 654 aa, Thielavia arenaria
LYINGSVIAPCDSPLYCHGDILKAIELARPFQDSKTFVDMPTIRPVEEVIAAFNRLSQPLSNNSELNAFLQANFAPAGGELEEVPESELSTNPVFLDKLNDTVIKEFVAKVIDIWPDLTRRYAGPGNCSECADSFIPVNRTFVIAGGRFREPYYWDSFWILEGLLRTGGAFTEISKNMIENFLDFVETIGHIPNGARIYYLNRSQPPLLAGMVKNYVDYTNDTSILERALPLLIKEYEFWTNNRTVQVTASDGKTYTLHRYNVNNNQPRPESYREDWITANNASYYAASGIIYPVKTPLNESEKAALYSNLASGAESGWDYGTRFLMRPEDAARDIYFPLRHLNVRDMVTVDLNAILYQNEVIISEYLEQAGNNTEAERFASAARQRSEAMYALMWNETLWSYFDYNLTSNSQYTFIPADVNATAAEKANAPEGQKVIFHIAQLYPFWTGAAPDQLKNNPLAVQKAYSRVAEMLDIKPGAIPATNFITGQQWDQPNVWPPLMHVLMAGLLNTPPTFGEDDPAYQAVQALALRLGQRYLDSTFCTWYATGGETSQTPRLQGVSPDATGTMFEKYADNAINVAGGGGEYEVVEGFGWTNGVLIWAADVFANGLKRPDCGNITAAHTHNGAKRAVELHPRDAAWTKKFGKRALKKRA

SEQ ID NO: 181 - protein, 661 aa, Thielavia antarctica
LYVNGSVTAPCDSPLYCQGEILKAIELARPFADSKTFVDMPTLRPLDDVIAAFRKLSQPLSNSSELNAFLAANFAPAGGELEEVPKSELRTKPAFLDKVEDVVIKEFVGKVIDIWPDLTRRYAGPGNCTECANSFIPVNRTFVVAGGRFREPYYWDSYWILEGLLRTGGDFTKISRNIIENFLDFVDTIGFVPNGARIYYLNRSQPPVLTLMVKTYVDYTNDTSILERALPLLIKEHEFWTTNRSVSVEVDGKTHTLNRYFVNNNQPRPESYREDWITANNASYYAASGIIYPVKTPLNGTQQAELYANLASGAESGWDYTSRWLKTPSDAARDVYFPLRSLNVINTIPVDLNSILYQNEVIISEYLEQAGNKSGAEKFSDAARQRSEAMYALMWNATNWSYFDYNLTSSGQNTHFPADADATAAETTSSPAGTQLLFSVSQLYPFWTGAAPQQLKSNPLAVTQAYARVAAMLDAKAGAIPATNLLTGQQWDEPNVWPPLQHVLMQGLLNTPATFGADDPAYQATQALALRLAQRYLDSTFCTWYATGGSTSATPRLAGVSAGAEGSMFEKYGDDSTNVAGGGGEYEVVEGFGWTNGVLIWAADVFAGKLQRPECGDIEAAQTHGGAARRGLGMERRAIELDPWDARWTKAFGKRALRRRA

SEQ ID NO: 182 - protein, 667 aa, Chaetomium sp.
LYINGSVTAPCDSPLYCQGEILKAIELARPFSDSKTFVDMPTIKPVDDVIAAFSRLSQPLSNNSELNAFLAENFAPAGGELEEVPESELETDPAFLDKLEDTTIKEFVTKVIDIWPDLTRRYAGPGNCSKCANSFIPVNRTFVVAGGRFREPYYWDSYWILEGLLRTGGAFTEISKNIIENFLDFVDTIGFIPNGARIYYLNRSQPPLLTLMVKTYVDYTNDTSILERALPLLIKEHEFWTNNRSVAITAADGKKYTLQRYYVNNNQPRPESFREDYITANNASYYAASGIIYPVKTPLNETEKAELYSNLASGAEAGWDYTARWLKTPNDAARDVYFPLRSLNVIGMVPVDLNSILYQNEVIIAEYLQQAGNSSEARRFATAAEKRSEAMYALMWNSTHWSYFDYNLTSNSQRIFVPTDADADPVDQTNAPPGHQVLFDIAQLYPFWTGAAPASLKNNPLAVQLAYARVAHMLDTKAGAIPGTNFRTGQQWDQPNVWPPLQHVLMKGLLNTPPTFGEADPAYQEVQRLALRLAQRYLDSTFCTWYATGGSTSDMPQLQGVNPGATGTMFEKYADNATNVAGGGGEYEVVEGFGWTNGVLIWAADVFGEGLTRPDCGNITAAHTHSGAKRGLDGGEGGAGGLWGRRAVELDPWDARWTKMFGRRKRE

SEQ ID NO: 183 - protein, 671 aa, Chaetomium nigricolor
LYINGSVTAPCDSPLYCQGEILRAIELARPFSDSKTFVDMPTIKPLEEVIAAFNQLTQPLSNNSELNTFLAENFAPAGGELEEVPKDELNTDPGFLDKLNDTTIREFVAKVIDIWPDLTRRYAGGGNCSECANSFIPVNRTFVVAGGRFREPYYWDSYWILEGLLRTGGAFIEISKNIIENFLDFVETIGFIPNGARIYYLNRSQPPLLTLMVKTYVDYTNDTSILERALPLLIKEHEFWVNNRSVEITAANGQTYTLNRYHVNNNQPRPESYREDYITANNGSYYAASGIIYPVRTPLNETEKAELYANLASGAESGWDYTARWLKTPNDAANDVYFPLRSLNVRGLVPVDLNSILYQNEVIIAEYLQQAGNLSLAQRFAEAAEQRSEAMYALMWNATYWSYFDYNLTSNSQRIFVPLDADSRTIETVGAPPGHQVLFDIAQLYPFWTGAAPANLKNNPLAVQQAYSRVASMLDAKAGAIPATNFRTGQQWDQPNVWPPLQHILMQGLLNTPPTFGDSDPAYQHVRDLALRLAQRYLDSTFCTWYATGGSTSDMPQLQGVSPDATGTMFEKYADNATNVAGGGGEYEVVEGFGWTNGVLIWAADVFGDALKRPDCGDIEAAHTHQAKKRDVEGLERRAVELDPWDAAWTKMFGRSKLRKRGAGGQKRWVS

SEQ ID NO: 184 - protein, 666 aa, Chaetomium jodhpurense
LYFNGSVIAPCDSPLYCQGEILKAIELARPFSDSKTFVDMPTIKPVDEVIAAFNRLSQPLTNNSELNAFLAENFAPAGGELEEVPKDELNTDPKFLDKLEDATIKEFVAKVIDIWPDLTRRYAGASNCSECANSFIPVNRTFVIAGGRFREPYYWDSYWILEGLLRTGGAYTQISRNMLENFLDFVETIGFIPNGARIYYLNRSQPPLLAMMIKNYVDYTNDTSILDRALPLLIKEHEFWINNRSVSITAADGKQYTLHRYNVNNNQPRPESYREDYITANNASYYAASGIIYPVKTPLNESEKAELYANLATGAESGWDYTARWLKTPNDAAKDVYFPLRSLNVRGMVSVDLNSILYQNEVIIAEYLERAGNISEAERFAAMAQQRSEAMYALMWNSTHWSYFDYNLTSNSQRIFVPLDDDSSTAEQANSPPGHQVLFDIAQLYPFWTGAAPESLKSNPLAVQLAYSRVARMLDTKAGAIPATNFRTGQQWDQPNVWPPLQHVLMAGLLNTPPTFGESDPAYQNVRALALRLAQRYLDSTFCTWYATGGETSQTPRLQGVSPDATGTMFEKYADNATNVAGGGGEYEVVEGFGWTNGVLIWAADVFADGLKKPDCGNITAAHTHSAKRGLERRAVELDPWDAAWTKMFGRSKLRKREEGRKRWLS

SEQ ID NO: 185 - protein, 670 aa, Chaetomium piluliferum
LYINGSVIAPCDSPLYCHGEILKAIELARPFSDSKTFVDMPTIKPLDEVIAAFSQLSQPLSNNSELNAFLAENFAPAGGELEEVSKDELQTDPTFLDKLDDTTIKEFVSKVIDIWPELTRRYVGSSDCSGCANSFIPINRTFVVAGGRFREPYYWDSYWILEGLLRTGGAFVDISRNIIENFLDFVETIGFVPNGARIYYLNRSQPPLLTLMVKTYVDYTNDTSILERALPLLVKEHEFWTTNRSVSITANGKEYTLNRYSVNNNQPRPESYREDYITASNESYYAESGIIYPVRTPLNETEKAELYSNLASGAESGWDYTSRWLKTPNDAANDVYFPLRSLNVLGLVPVDLNSILYQNEVILAEYFEQAGNSSEAERFAAAAEQRSEAMYDLMWNATHWSYFDYNLTSSSQRIFVPLDDGASTQEQSTSPPGYQVLFDVAQLYPFWTGAAPAALKSNPLAVQHAYSRVADMLNTKAGAIPATNFRTGQQWDQPNVWPPLQHIIMQGLLNTPPTFGESDPAYENTQSLALRLAQRYLDSTFCTWYATGGSTSDMPPLQGVSAGATGTMFEKYADDATNVAGGGGEYEVVEGFGWTNGVLIWAADVFGDALKRPDCGNITAASTHEGATKRDLRGLGRRAVELDPWDAAWTKMFGRAKLRKREQGRETWVN

SEQ ID NO: 186 - protein, 674 aa, Myceliophthora hinnulea
LYINGSVTAPCDSPIYCHGELLKGVELAHPFVDSKTFVDMPTLKPVDEVLAAFSKLRQPLSNNSELNNFLAEYFAPAGHELEEVPDSELQTDPKFLDKLEDRTIKEFVSKVIDIWPDLTRRYAGPGDCSDCANSFIPVNRTFVVAGGRFREPYYWDSYWILEGLLRTGGAFTQISKNIIENFLDFIDTIGFIPNGARIYYLNRSQPPLLTRMVKSYVDYTNDTSILERALPLLIKEHDFFTNNRSVSVTASNGKTYTLHRYHVENNQPRPESYREDYITANNGSYYAASGIIYPVKTPLNETEKAVLYSNLASGAESGWDYTARWLRVPDDAARDVYFPLRSLNVREIVPVDLNSILYENEVIIAGYLEKAGNSSEAKRFASAAKQRSEAMYNLMWNATHWSYFDYNLTSNAQNIFIPADEDTAPFDRTAAPPGKQVLFHIAQLYPFWTGAAPAHLKSNPLAVQKAYARVSRMLDSKKGAIAATNYRTGQQWDQPNVWPPLQHVLMQGLLNTPATFGESDPAYQGVQKLALRLAQRYLDSTFCTWYATGGSTSDFPQLQGVSPDATGIMFEKYADSAINVAGSGGEYEVVEGFGWTNGVLIWAADVFGNKLKRPDCGNITAAHTHSEAKRSLGDGGLARRAVELDPWDAAWTKMFGRSKLRRREAEDVRKRWSS

SEQ ID NO: 187 - protein, 659 aa, Chloridium virescens
LYINGSVIAPCDSPLYCQGDILKAIQLAQPFSDSKTFVDMPTTQPVDQVIAAFNQLPQPVSNNSGLQNFLSTYFAPAGGELTEVPKDQLQTNPMFLNKLNDTVIREFVTAVIDIWPDLTRTYTGASNCTGCSDSFIPVNRTFVVAGGRFREPYYWDSFWILQGLLRTGGAFTQISKNIIENFLDLVDQFGFVPNGARVYYLNRSQPPVLSEMVRTYVAYTNDTSILARAIPTLIKEHNFWMQNRTVNITGADGNTYTLNQYHVENTQPRPESYTEDYITANNHSYYATSGIIYPETKPLNDSEIANLYANLASGAESGWDYGSRYLARPNDAAQDVYFPLRSLNVLNIVPLDLNSLLYQSEQNIALFLQATGNSSEAEQWTSLAAQRQTAIHALMWNETLWSYFDYNLTSNGQNIYVPADKDATPADTASAPPGYQVLFDVAQFYPFWTGAATDELRRNPLAVRQAFTRVDAYLTAKAGGIPATNLMTGQQWDQPNVWPPLMHVLMQSLLDTPATFGAADPSYAALQGLALRLAQRYLDMTFCTWYATGGSTSQTPKLQGLGPDAVGTMFEKYADNATNIAGSGGEYTVVEGFGWTNGVLIWAADTFGAQLTRPNCGNITAAHVTPGKRSVGLGRRAVELHESDARWVKMFGSRAWRNA

SEQ ID NO: 188 - protein, 662 aa, Gelasinospora cratophora
LYVNGSVTAPCDSPIYCYGELLHQVELARPFSDSKTFVDMPTIKPVDEVLEAFSKLTLPLSNNSELHEFLNTYFGPAGGELEAVPTDQLHVSPTFLDNVSDDVVKQFVNSVINIWPDLTRKYVGAGEICTGCANSFIPVNRTFVVAGGRFREPYYWDSFWILEGLLRTGGAFTEISKNTIENFLDLVEQIGFVPNGARLYYLNRSQPPLLTQMVRIYVEHTNDTSILERAVPILKKEWEWWITNRTVEVTADGKTYSLQRYHVDNNQPRPESYSEDYITANNNSYYATSGIIYPETTPLNDTQKAQLYANLASGAESGWDYSTRWLKNPNDAARDVYFPLRSLNVLEIVPVDLNSILYQNEVTIGKFLAQQGNKDEAEEWAKKAEQRSEAMYKLMWNSTLWSYFDYNLTSSSQNIYVPADPQVFPFEKPSGTPEGYQVLFSINQMFPFWTGAAPDQLKANPLAVKLTFDRVKNYLDNKAGGIPATNFVTGQQWDEPNVWPPLMHVLMDGLLNTPATFGEDDPAYQETQNLALRLAQRYVDSTFCTWWATGGSTSETPKLQGLGSDAKGIMFEKYADNSTNVAGGGGEYEVVEGFGWTNGVLIWAADKFGDKLKRPNCGDLTPANVGKRAVELDAFDAKFTKKFARKGKLEKLKAKFKRRAAI

SEQ ID NO: 189 - protein, 543 aa, Acidobacteriaceae bacterium
QTTTTSAGLHDTLAYIKRTWHTLERSNKTLLKSADDVKVGQAGTLTLYVSQDVKPQAVNASLRRELPPADKKRIVVRQLPEHPEAVEPAGLLYLPYPYVVPGGRFNEMYGWDSYFILLGLVHDDELALAKNMTDNFIYEIEHYGMILNANRTYYLTRSQPPFLTQMILEVYRRTGDGKWLASTLPAIEKYYAYWMREPHLTPETGLSRYWGGADTPAPEVVHGEKDAAGHNQYDRVREYYRTHNVTAYDVSQYYDKATDRLKPLFYIADRAMRESGFDPSSRYGPFSADIIHYDPVCLNSLLYRMESDTATILKQLNRTSEARVWEKRATQRAELVNRLMWNEEKGLYFDYDFITRRQSNYHFVTTFYPLWAGIASRQQADRVRKNLSIFERAGGLQTSDYISGSQWDAPFGWAPLQIMTVEGLRRYGFNEDADRISRKFINMVVRDFEEHGTIKEKYDVVIGKSDLAAGLKFGYTSNEAGFGWTNAAVVLFIEELAGERPLAASLDRESMPMLRQRHLSPQPSVWPPFSPQAPQYRRRDPYR

SEQ ID NO: 190 - protein, 532 aa, Acidobacterium capsulatum
GARSSLSPHAVAGPQPIDAYIHTAWSTLTRSMSDCKSVADPKLKSTPVLYLPRDLAVPANVAAMQKQCHVRVLRLPIVITHFDQIRESQIATPGLLYLPHPYVVPGGRFNEMYGWDSFFILKGLLDDHHIALARGIVENFFFEIAHYGGILNANRTYYFTRSQPPFLSSMIRAIYAAEVAEGHTQAAHAWLVEAYPYAVRDHALWMSPIHQAGNTGLARYFDTGQGPVPEMADDSTYYQDVIRWLLAHPGLHTGYLMHGSPHLDAAARERLAQLSCDPTLSKVCARAHVHGYWLTRSFYKGDRAMRESGFDTTFRFGPFSGSTQHFAPVGLNALLYKYERDLAWMAAQLGKPGEAAKWNSEAETRRAEMNHYLWNAQKKMYFDYNFETHRQSSYAFITTFYPLWAGAADKAQQQGVIASLPLFEHPGGLAISNHDSGVQWDLPYGWAPTEWMAVQGLLRADDQHDARRIASEFNRTVRTTYQHDHAIYEKYDVVNRSNDFRVTAGYTQNVVGFGWTNAVYLEFQSLLAHPGQ

SEQ ID NO: 191 - protein, 568 aa, Acidovorax wautersii
AAAVSSGLRISERHPAYSTNPARVQVPGAPGAPPSDHCTPADRYQELFVAVQSQQIFEDSKTFVDCGPIGEPEDILAAYRAEHAQPDFDLARFVAQHFTAPQVAANDYVGAPGMALAEHIDALWPVLTRKPEDHPVRGSALPLAHPYVVPGGRFAELYYWDSYFTMLGLAATGRSELVQCMTDNFARLIDAFGFVPNGTRTYYLSRSQPPLFAAMAELGALVGGPPVSHYLPQLLQEHAWWMDGLHVLHPGEARRRVVALPGGEILNRYWDDRDTPREESWREDIETASAVDRPSADVYRDLRAAAESGWDFSTRWLRAPDAANPASLHLSQICTTDLLPVDLNAFLYRMEVSIAKASQSAGDRATATHFHDLAAHRREAVNRLMWNEAEGAYFDYDWRRGELRGCLTAATVVPLYAGMATEAQAAAVARAVRTHLLAAGGLATTVCSSDQQWDRPNGWAPLQWMAVRGLERYGHKDLALEVRQRWIETVRSVYQREGKLVEKYAVGNGDGAPLCGGGGGEYPLQDGFGWTNGVVQCWLDPRYDTYAAAQTVYYGPTDDGTADSLPEA

SEQ ID NO: 192 - protein, 529 aa, Xanthomonas arboricola
APMDTPVVNAPAATPPTPDLAYPELFQAVQSGELFDDQKHFVDFLPLRDPALINADYLAQHDHPGFDLRKFVDANFEESPPVQTDAIRQDTALREHIDELWPKLVRSQTHVPPYSSLLALPHPYVVPGGRFREVYYWDSYFTMLGLVKSGETTLSRQMLDNFAYLIDTYGHIPNGNRSYYLSRSQPPFFSYMVELQAGVEGEAVYQRYLPQLRKEYAYWMQGSEDLQPGQAARHVVRLADGSLLNRYWDERDTPRPEAWLHDTRTAAEAGDRPAAEVYRDLRAGAESGWDYTSRWLADGQNLRTIRTTAIVPIDLNSLLYHLERTLAQACAQPGAECAQDYAALALRRKQAIDAHLWNAAGYYADYDWQTRKLSDQVTAAALYPLFTGLATDAHAKRTASTVRARLLRPGGLATTAVKTGQQWDEPNGWAPLQWVAVDGLRRYGEDALARTIGERFLTQVQALFAREHKLVEKYGLEADAAGGGGGEYALQDGFGWTNGVTLMLLNLYPDTATKPAPAKRARKPEAAAR

SEQ ID NO: 193 - protein, 540 aa, Kosakonia sacchari
AEAQNTPQPPDILLGPLFSDVQTAKLFPDQKTFADAVPKGDPLMILADYRMQRMQTSFDLRHFVDVNFTLPKEGEKYVPPEGQNLREHIDGLWPVLTRTTDSAGKWDSLLPLPKPYVVPGGRFREVYYWDSYFTMLGLAESGHWDKIEDMVTNFAHEIDTWGHIPNGNRSYYLSRSQPPFFSLMVELLATHDGDEALKTWLPQMEKEYQYWMEGADTLQPGQANKRVVKLSDGSVLNRYWDDRDTPRPESWLDDVTTAKNNPNRPATEIYRDLRSAAASGWDFSSRWMDDPNQLGTIRTTSIVPVDLNALMFKMEKMLARGYQAAGDSAKASQYDALANARQKGIEANLWNEKEGWYADYDLKTKKVRNQLTAAALYPLFVNAAAKDRADKVASAAKERLLKPGGIATTTVNSGQQWDAPNGWAPLQWVATAGLQNYDQQKLAMEVSWRFLTNVQHTYDREKKLVEKYDVSTTGTGGGGGEYPLQDGFGWTNGVTLKMLDQICPKEKPCDSVPQTQPAQQPAAKVEPTSQPSKQQQAVAQ

SEQ ID NO: 194 - protein, 532 aa, Enterobacter sp.
DEQPAFQKNSPDILLGPLFNDVQSAKLFPDQKTFADAVPKSDPLMILADYRMQHTQSSFDLRHFVEMNFTLPAEGEKYVPPAGQSLREHIDDLWPVLTRTTDKASNKWDSLLPLPKPYVVPGGRFREVYYWDSYFTMLGLAESGHWDKISDMVDNFAWEIDTFGHIPNGNRSYYLSRSQPPFFSMMVELLATHDSDALKKYRPQMEKEYAYWMEGVDSLQPGQANQRVVKLDDGSVLNRYWDDRDTPRPESWLDDVNTAKNNPNRPATEIYRDLRSAAASGWDFSSRWMDDPQKLGTIRTTSIVPVDLNALMFKMEKLLARASQEAGDSAAASKYEALATARQKAIENHLWNDKEGWYADYDLKSKKVRNQLTAAALFPLYVKAASQERADKVAAATSARLLKPGGITTTTINSGQQWDAPNGWAPLQWVATEGLQNYGQNKVAMDVTWRFLKNVQHTYDREKKLVEKYDVSTTGTGGGGGEYPLQDGFGWSNGVTLKMLDLVCPKEKPCDSVPENQPAANDEAAPVKASAQ

SEQ ID NO: 195 - protein, 720 aa, Saitozyma flava
QNPASSSSFSPTPVTTMVPSPTAALNATVPGQGVYPPLQAWCNNGGNDTFCPGVLLQDVQLSGIFPDSKTFVDKPTRGTLNETLRTFASLGNNLTVGQIEGFVNNSFKGEGLELSQVALEGFNPNPAFLDTISDPIYQGWMSVVNSYWTLLIRETNRSALCNGDCESSLIPLNNTIVVPGGRYREIYYWDSYWILIGLLESELTAYATDLISNFMDFIQTYGFIPNGGRKYYLNRSQPPVFTQMLNTYVQRTGNTSILARGLPLAHQELVWWENNRVISVTSPYSNITRRVAHFAVNNTAPRPEGYVEDYETAFGASPALNETARGQLYSDLAAGAESGWDYSSRWCKQPVINLTDNFPALRTINTAKIIPVDLNSLLAGDHTLLANLYELYGNSSNANTSVTSNSSQLVPYHRQLAKNYSDAVLDLHWDAQKAWFYDFNLTANARADIYHPGGTFALWQNITPPAVASNETYALEVVSGARFLLGKYTSIPSVSTLIETGLNWDFPNSWPPHVYSSIKAFETLGRAFPNASVLSNISIPFSDVQKNQLGLDESAIPAQPASTIGNSTSQIAEAQGKPWPQALSIEYANRYMQAAFCSWYSTGGSIDGLLTQLPLSELNMTGTFQAGTTGVMFEKFNVTDLDAAGGGGEYKVQIGFGWTNGVALWLGANFGQYLPQPTCPLIPIIEVQNGMNSSVYQNGTMTNSTKTQSYIFQGHRIPRK

SEQ ID NO: 196 - protein, 723 aa, Phaeotremella skinneri
QTPTSSSSSSFSATPVSTSVPSPTVPLNSSVIGQGLYPPAQAWCNGGMNDTFCPGVLLQDVELSGIFADSKTFPDKPTVGTLNSTLQAFAALPANVTVGEIETFVNQYFKGEGLELEQVAIEGFVANPAILNNITDPVFKGWVSTVNGYWQLLIRQTNESSLCNETSCASSLIPLNHTIVVPGGRYREIYYWDSFWILQGLLKSELYTYSWDLLQNFMDLIETYGFLPNGGRKYYLNRSQPPVFIQMLDAYIKVTGNSSILARALPIATTELAWWSSNRTIPVTSPYTGITHLVAHYAVTNSAPRPEGYVEDFTTAMGASPALNDSARAELYSELASGAETGWDYSSRWCRQPLLNLTDNNPALRTLNVKAIIPVDLNSLLAGDHALLANLYDLYSNSSSSNSTSNSSSISNSSSQAAYHRQAAQNLTAAILDLHWSPSKSFFYDFNTSSNSQSDIYTPASLFPLWQNITPPALVGNETAALQLVSGVRYLLGKYAGIPSVATLLATGLNWDFPNSWPPHVYTSIKAFQTLYRVNPNATVLSNLTLSFAQVQAGQLGLSETGFQIQPASTVGNTSLETAEAKGKPWPVALGIEYANRYMQSAFCSWYSTGGEISGVLTQLPLSDLNSTGTFTAGQTGVMFEKFNVTDPDAAGGGGEYTVQTGFGWTNGVVLWVAGEFGSLLPAPTCPLIPIIEISGSSNSSIYANGTVTNSTALYRGYKIPRK

SEQ ID NO: 197 - protein, 663 aa, Trichoderma asperellum
LYTNGSVIAPCDSPIYCHGDILQDIQLAHPFSDSKTFVDMPAKRPLREIQSAFNNLSKPLTNDSSLQVFLETYFADAGGELVEVPRSSLTTNPAFLNKINDTVIREFVTKVIDIWPDLTRRYSGAVGNCSTCPNSFIPVNRTFVVAGGRFREPYYWDSYWIIEGLLRTGGAFVGIAKNTIENFLDFIDRFGFIPNGARLYYLNRSQPPLLSQMVRIYIEHTNDTSILKRALPLLVKEHDFWIRNRTISVNIANKTYTLQQYAVQNTQPRPESFLEDYVTANNRSYYATSGIIYPENKHLNSTEMADLYANLATGAESGNDYTSRWLANPSDAINDVYFPLRSLNNKEIVPVDLNSILYGNELTISQFYNRTGDATAARAWAERAANRSAAIQAVFWNETLFSYFDYNLTSSSQYVYVPADKDTISLDRQTAPSGKQVFFHVGQFYPFWTGAAPDYVKNNPYAVTRAYDRVTGYLDAQPGGIPASNVQTGQQWDQPNVWPPHMHILMQGLNNVPATFTAQDPSYQDIQNLSLRLGQRYLDFTFCTWLATGGSTSETPKLHGLSDQDVGIMFEKYDDNSTNAAGGGGEYEVVEGFGWTNGVLLWTADTFGNKLKRPQCGNITAGHPAPASSSSKRSAVQLDAWDARRVKKFGKRTEGRVKRPFLF

SEQ ID NO: 198 - protein, 674 aa, Corynascus sepedonium
LYINGSVTAPCDSPIYCQGELLKAVELARPFVDSKTFVDMPTIKPVDEVLAAFSKLSLPLSNNSELNAFLYENFAQAGHELEEVPDSELETDAKFLDKLEDRTIKEFVGKVIDIWPDLTRRYAGPSNCTECANSFIPVNRTFVVAGGRFREGYYWDSYWIVEGLLRTGGAFTHISKNIIENFLDFVDTIGFIPNGARIYYLNRSQPPLLTLMVKSYVDYTNDTSILDRALPLLIKEHEFFMNNRTVSITGSNGKEYTLNRYHVENNQPRPESFREDYITANNGSYYASSGIIYPVKTPLNETEKAALYSNLATGAESGWDYTSRWLGVPSDAARDVYFPLRSLNVRDIVPVDLNSILYQNEVIIAEYLEKAGNSSAAKRFATAAEQRSEAMYSLMWNATHWSYFDYNLTDNTQHIFVPADEDTAPQDRIEAPPGQQVFFHIAQLYPFWTGAAPASLKANPLAVQQAYARVARMLDIKKGAIPATNYRTGQQWDQPNVWPPLQHILMKGLLNTPATFGKSDPAYQSVQNLALRLAQRYLDSTFCTWYATGGSTSDFPQLEGVTPGATGVMFEKYADNATNVAGTGGEYEVVEGFGWTNGVLIWAADVFGNKLKRPDCGNITAAHTHSSAKRGLEENKLPRRAVELDPWDAAWTKMFGRSKLRRREAEDVRKRWMS

SEQ ID NO: 199 - protein, 674 aa, Myceliophthora thermophila
LYINGSVTAPCDSPIYCHGELLKGVELAHPFVDSKTFVDMPTLKPVDEVLAAFSKLRQPLSNNSELNNFLAEYFAPAGHELEEVPKGELQIDPKFLNKLEDRTIKEFVSKVIDIWPDLTRRYAGPGDCSGCANSFIPVNRTFVVAGGRFREPYYWDSYWILEGLLRTGGAFTQISKNIIENFLDFIDTIGFIPNGARIYYLNRSQPPLLTRMVKSYVDYTNDTSILERALPLLIKEHDFFTNNRSVSVTASNGKTYTLHRYHVENNQPRPESYREDYITANNGSYYAASGIIYPVKTPLNETEKAVLYSNLASGAESGWDYTARWLRVPDDAARDVYFPLRSLNVREMVPVDLNSILYENEVIIAEYLEKAGNSSEAKRFASAAKQRSEAMYNLMWNATHWSYFDYNLTSNAQNIFVPADEDTASFDRYAAPPGQQVLFHVAQLYPFWTGAAPAHLKSNPLAVQKAYARVSRRLDTKKGAIAATNYRTGQQWDQPNVWPPLQHVLMQGLLNTPATFGESDPAYQGVQKLALRLAQRYLDSTFCTWYATGGSTSDFPQLQGVSPDATGIMFEKYADSATNVAGGGGEYEVVEGFGWTNGVLIWAADVFGNKLKRPDCGNITAAHTHSEAKRSLGDGGLARRAVELDPWDAAWTKMFGRSKLRRREAEDVRKRWSS

SEQ ID NO: 200 - protein, 661 aa, reesei GH37
LYINGSVIAPCDSPIYCHGDILREIELAHPFSDSKTFVDMPAKRPLSEIQTAFANLPKPLRNDSSLQTFLASYFADAGGELIQVPRANLTTNPTFLSKINDTVIEQFVTQVIDIWPDLTRRYAGDAAVKNCSSCPNSFIPVNRTFVVAGGRFREPYYWDSYWIVEGLLRTGGAFVGIARNTIDNFLDFIERFGFVPNGARLYYLNRSQPPLLSRMVKVYIDHTNDTAILRRALPLLVKEHEFWTRNRTVDVRVNNKTYVLNQYAVQNTQPRPESFREDFQTANNRSYYAASGIIYPATKPLNESQIEELYANLASGAESGNDYTARWLADPSDAMRDVYFPLRSLNNKDIVPVDLNSILYGNELAIAQFYNQTGNTTAAREWSSLAANRSASIQAVFWNETLFSYFDYNLTSSSQNIYVPLDKDAVALDRQTAPPGKQVLFHVGQFYPFWTGAAPEYLRNNPFAVTRIFDRVKSYLDTRPGGIPASNVNTGQQWDQPNVWPPHMHILMESLNSVPATFSEADPAYQDVRNLSLRLGQRYLDFTFCTWRATGGSTSETPKLQGLTDQDVGIMFEKYNDNSTNAAGGGGEYQVVEGFGWTNGVLLWTADTFGSQLKRPQCGNIMAGHPAPSKRSAVQLDMWDASRVKKFGRRAEGRMGTLHAW

SEQ ID NO: 201 - protein, 670 aa, Chaetomium virescens
LYINGSVTAPCDSPLYCQGEILKAIELARPFSDSKTFVDMPTIKPLEEVIAAFGRLKQPLSNNSELTAFLAENFAPAGGELEEVPKSELHTDPVFLNKLDDAVVKEFVGKVIDIWPDLTRRYAGPGNCSNCENSFIPVNRTFVVAGGRFREPYYWDSYWIVEGLLRTGGAFVGITKNILENFLDFIETIGFVPNGARIYYLNRSQPPLLTKMIKIYVDHTKDTSILQRALPLLIKEHEWWTNNRSVTVTGPNGKTYTLNRYHVNNNQPRPESFREDYITANNGSYYATSGIIYPVKSPLNETEKDETYANLATGAESGWDYTARWLRTPNDAAKDVYFPLRSLNVRNMIPVDLNSILYQNEVIIGEYLEQAGNKSEAQRWFQAANQRSEAMYALMWNATHWSYFDYNLTSNSQYIFIANDEDATTAEQANSPPGQQVLFSISQLYPFWTGAAPDQLKKNPLAVQQAYYRIERMLNEKAGAIPSTNFRTGQQWDEPNVWPPLQHILMQGLLNTPATFGTADPAYAAVQNLALRLAQRYLDSTFCTWYATGGSTSQTPQLQGVSPGATGIMFEKYADNATNVAGSGGEYEVVEGFGWTNGVLIWAAETFGNKLKRPDCGDIQAAHTHTDKKKRWSVDGEVRARERMAVELDPWDAKWTKMFGQAKGRVGRRS

SEQ ID NO: 202 - protein, 508 aa, Rhodothermus marinus
QDRVACQVPLPSVERIEAVRAYIRQSWDVLTRSHRDLLAAVQDPKIEHEPGTPWPLYIAATEDSVAVWHRLQQELPDSVLQQIVLRVLPEDPVAHLDEIHPHGLLYLPEPYVVPGGRFNEMYGWDSYFIVVGLLRDGRVDLAKAMTDNHLYQVRHYGKVLNANRTYYLTRSQPPFLSAMVLAVYAHTQDRDWLAAAVPLIERYYAYWTTPPHLAGETGLSRYYDLGEGPAPEVVAGERDAQGRTHYDRVREYYRMHEVTAYDESLYYVAEADSLTPLFYKGDRSMRESGFDPSNRFGPFSVDIIHYAPVGLNALLYRMETDLARIHEILGDTAAAAAWRARAEARRERVDRYLWDSERGLYFDYNFRTGRRSDYVFATTFYPLWVGMASPEQAARVAANLYLLEAPGGLLTSTHISGSQWDAPYGWAPLYLIAVEGLRRYGYDEAADRLTAKFVSMIVEDFERTGVILEKYDVVQRRSDVALRYGYTSNEIGFGWTNAVFAELLAQMD

SEQ ID NO: 203 - protein, 674 aa, Myceliophthora sepedonium
LYINGSVTAPCDSPIYCQGELLKAVELARPFVDSKTFVDMPTIKPVDEVLAAFSKLSLPLSNNSELNAFLYENFAQAGHELEEVPDSELETDAKFLDKLEDRTIKEFVGKVIDIWPDLTRRYAGPSNCTECANSFIPVNRTFVVAGGRFREPYYWDSYWIVEGLLRTGGAFTHISKNIIENFLDFVDTIGFIPNGARIYYLNRSQPPLLTLMVKSYVDYTNDTSILDRALPLLIKEHEFFMNNRTVSITGSNGKEYTLNRYHVENNQPRPESFREDYITANNGSYYASSGIIYPVKTPLNETEKAALYSNLATGAESGWDYTSRWLGVPSDAARDVYFPLRSLNVRDIVPVDLNSILYQNEVIIAEYLEKAGNSSAAKRFATAAEQRSEAMYSLMWNATHWSYFDYNLTDNTQHIFVPADEDTAPQDRIEAPPGQQVFFHIAQLYPFWTGAAPASLKANPLAVQQAYARVARMLDIKKGAIPATNYRTGQQWDQPNVWPPLQHILMKGLLNTPATFGKSDPAYQSVQNLALRLAQRYLDSTFCTWYATGGSTSDFPQLEGVTPGATGVMFEKYADNATNVAGGGGEYEVVEGFGWTNGVLIWAADVFGNKLKRPDCGNITAAHTHSSAKRGLEENKLPRRAVELDPWDAAWTKMFGRSKLRRREAEDVRKRWMS

SEQ ID NO: 204 - protein, 657 aa, Moelleriella libera
LHTNGSLIAPCDSPIYCYGDILKQVELARPFADSKTFVDMPGVKPLAEIQAAFDKLEKPLRNNTALQDFLKTYFADAGQELQEVPKSELKTDPQFLKTLNDTVIREFVTKVIDIWPDLTRSYKGSNTNCTDCPNSFIPINRTFVIAGGRFREPYYWDSYWILEGLLRTRGSFTQIAKNTLENFLDFVEQFGFVPNGARIYFLNRSQPPMLSQMVKLYIDHTNDTAILQRALPLLVKEHAWWMNNRTVDVQVGGKTYKLNRYAVSNTEPRPESYREDFETASNSSYYAQSGIIYPETKKLNDSQRAVLYANMATGGENGWDFSSRWIANPSDSVRDVYFPLRTNNAQNVVPVCLNSILYGNEMTIGGFFNSTGNTTAGQEWAAKAKARSEAMHATMWNETHFSYFDYNLTSSAQDVYTLADDDTSIYDNGTLTGAPPGYQVAFNGAQFYPFWQGAAPTYLKENPQAVKTAYARVAQYLKVRKGGIPATNLKAREQWDQPNVWPPLMHILMQGLLNTPPTFGSSDPSYKSVRSMALTLAQRYLDSTFCTWYATGGSTSETPKRPGLPEKDKGIMFEKYADNSIDIAGSGGEYEVVEGFGWTNGVLIWAADTFANELKRPDCGNGSSSSSTSSAAKRGLSAVELHPADASRIKRFGSSKG

SEQ ID NO: 205 - protein, 660 aa, Acremonium dichromosporum
IYVDGNITAPCDSPVYCYGEMLHQIQLAKPFDDSKTFVDMPALKPLSQIQAAFDRLDKPLSNNSALNNFLDEFFADAGGELSEVDKADLETDPVFLDKIDDEVVKEFTNKVIDIWPDLTRRYSGAAASNCTNCPSSFIPLNRTFVVAGGRFREPYYWDTYWIIEGLLRTGGSFTDISRDIIENFLDFVDQFGFVPNGARIYYLNRSQPPVLSRMVQAYIEHTNDTDILDRALPLLMKEHEFFSENRTIDIEGPNGTTYTLNRYDVRNNQPRPESYSEDYETATNTSYYSHDSGIIYPETEPLNDTERANLYSALASGAESGWDYSSRWIARPRDAAEDVYFPLRSLNTNNIVPVDLNSIMYANEMAIAGFLNQTGNASAAAEWEELAYNRSEAIHALMWNETYMSYFDYNLTSAAQHIYVPADDDVSTLESSTAPEGHMVLFSVSQFYPFWTGAAPSYIKNNPFAIAQIYKRVETLLDTRKGGIPATNFRTGQQWDQPSVWPPLMHILMAGLQNTPATFGEDDPAYQHVHEIALRIGQRYLDSTFCTWRATGGATSETPQLEGFTDRDVGIMFEKYADNSTNIAGGGGEYEVVEGFGWTNGVLIWTVDEFGNELKRPDCGDLEAADTTERRKRSALQLAPRDAQRTKKFGKRAVERQPWF

SEQ ID NO: 206 - protein, 667 aa, Fusarium sambucinum
LYVNGTVVAPCDSPIYCHGDILEQVELARPFSDSKTFVDMPAIRPLSEIQKAFDELDKPLRNNSALADFLSENFADAGNELEEVPEDELKTDPKFLDNINDTVIREFTEKVIDIWPDLTRRYDQDSKNCSDCPNSFIPVNRSFVVAGGRFREPYYWDSYWIIEGLLRTGGSFVNIAKNTIENFLDFIEEYGFVPNGARIYYLNRSQPPLLSQMVKIYIDHTNDTDILERALPLLVKEHEFFMKNRSVPVYINDETYMLNTYNVSNTQPRPESYREDYITATNKSYYSTSGEVYSGGEELSFKQKETLYGNLASGAESGLDYTSKWIARPENAIRDNYFPLRYLNTRNIIPVDLNSILYGNEIAIADFYEQTGNSSASEQWREVAANRSYAMHAFMWNETLWSYFDYNLTSKAQQIYFPADNNTVSVDTEDAPKGQQVFFSPTQFYPFWLGAAPDYLKNNPYAVLSAYKRVATYLDKREGGIPASNIETGQQWDQPNVWPPMMHILMAGLEKVPATFGIMDPSFIEIRKLALRLGQRYLDSTFCTWYATGGSTSETPKLESVSDKEDGIMFEKYADNATNTAGGGGEYEVVEGFGWTNGVLIWAVEEFGNRLTRPKCKNLETAHSSDKRDTSAVMLHARDAKHVKKFGRRKRAEEKAAKKRSSRLFHF

SEQ ID NO: 207 - protein, 660 aa, Phoma sp.
LYQNGSIIAPCDSPIYCYGDLLREIELAQPFSDSKTFVDLPTIRPLDEVLRAFNNLTKPIQNNTELNNFLTTYFGEAGSELDALPKDQLETQPDFLDNVNSSVIVNFTSQVIDIWPDLTRRYVGAGNCTGCVSSFIPVNRTFVVAGGRFREPYYWDSFWIIEGLLRTKGSFTQIAENIIENFMDLVEELGFVPNGARRYYENRSQPPLLTQMVRVYVEYTQNYTLLERALPVLEQEYEFWVNNRSVTLERGGKNYTLHHYNVSNTQPRPESYREDYITANNLTYYNENGEQFNASHPLNDTQKALLYAELASGAETGWDYSSRWLANPSDAVNDDFFPLRSLNVINTIPVDLNSILYYNEITIAEFHRREGNYCAARQWAELARNRSEAMTALLWNAEYYSYFDYNLTSSAQNIYTLADNTSTPLSLAGAPAGYQVGFQLSQLYPFWTGAAPDSIKGDPTAIRRAFARVEEALDTEAGAVSATNLFTGQQWDEPNVWPPLQYIAIQGLLNTPLEVSEDDDEQTAEDYVWTQNLALRLAQRYTDSLFCTWRSTGGATEEEPQLPGATGNGTIFEKYSDEAINARGGGGEYTVVEGFGWSNGVLIWAVDNFGQKLTTPDCGNITAAAPPSTASKRKRSAVEIHQRDAAWIKGTKENKMFGKK

SEQ ID NO: 208 - protein, 737 aa, Lentinus similis
LPQAVTPSSTSVSSQTVSTAVPSPTASLTSTLPSQIPLPPKQDWCPSEIFCAGELLQTVNVAQLYPDPKTFVDKPTARKSQQVVSNFQNIGGNSSNVTVGAIEDFVNSNFKGEGLELEPIAFANFNPTPAFLNNVSDPLVKAWSQIVHGYWTQLTRSTNDSALCPEGTESGSCESSLIPLNHTFVVPGGRFREQYYWDSYWIVQGLLVSELYDIVNDTLQNFMDELEHIGFIPNGGRIYYLNRSQPPLFIHMLTSYVQASGDTSILKRALPLAEKELAWWSANRSVQVKSPYTNATHNVYRYHVTNTAPRPESYYTDYITANDPTLQTPLTEQQRADLYAELATGAESGWDYSSRWLKEPLAGGSNNTSPALRSLNIRSLVPVDLNSILYKAHLNLAALYNNESHSAAASNHTQAAIALREAILDLHWDANKRAFYDFNITSNARNDIFSAATFYPLWSGIIPDEILSDGSGATAFGAFAAVNMVLNRYNGTFPVTFLETGLQWDAPNAWPPHQFIIIEALRNLPSNITNTPLPSAPSGNSTYALIPAGQVGIAEGDLPGQILSPGQNATKTGPAADINTLNGTVVNGGNATSGEGWAAVLQRELANRYIASALCSWHATGGEVPNLLPRLSDSQLQITQSQNNTGNMFEKFSINDIDSAGRGGEYTVQAGFGWTNGVVLYLTHVFGDKLVAPSCPNLVALSSNTATTSGAVAQMTLPSSLAVTVGAVVLGFVGLVL

SEQ ID NO: 209 - protein, 683 aa, Diaporthe nobilis
QTLDGIYYDGDNIAPCSSALYCYGDILDSIQRAKPFADSKTFVDMPTRVPLEEVRAAYDQLTKPLQNNTELLDFLSNNFGPAGQEVVPVDPGSLGVNASFLGGIANAVNREFTEAVIDLWPNLTRWVNESAVCAECDNSLLSIKRPFIVAGGRFREPYYWDSYWILHGLLRSGGNFTRIARNQIENFLDFVEDYGFVPNGARVYYLNRSQPPLLAQMVRIYIEQTGDATILDRAIPLLIREHDFFMSNRTVHVSVGSRNYTLNRYNVANTEPRPESYYEDYTQVNNASYYANDGRVFPTRNTTQAEKDLQYKNLASGAESGWDFSTRFMRDPTIAANDTYFPLASYNIINIIPVELNSILYWNEVTIAAFLRQQQQQVPNATAEADADAWDARAASRSEAMYSVMWNETLGGYFDFNLTSGSQDVFWARDADSLPTEQAGTEPGQQVVFNIGQLSPFWTGAAPRSLAGDPAAVRRAFSRVDEYLGSRKGGIAPTNFVSGQQWDQPSVWPPHMHILMEALLRTAEAGGESEGGSEDWAWAQDLALRLGQRYFDSAYCTWRATGGGTPSSPPLANPPQDLGGQMFEKYSDQSLNEAGSGGEYVVVVGFGWSNGVLIWVADTFRDRLQTPACGDLTTRGEAGKMREKRMSENGRHGDGSNAISAVKLDYFDAAWTSENVGGLHGVR

SEQ ID NO: 210 - protein, 763 aa, Solicoccozyma terricola
QGNSSMSASNATSSSTGTGTSSSAAAVMTAVPMPTAPLSSPVEMLPLPPVQPWCNGGENATYCPGSLMQLVQLSGIYNDSKTFPDKPTQYNASVTYQAFDALPVNATVGDVETFVEKYFKGEGQELETVQIQNFTQNPTFLNVIDDELYKGFVSTVNGYWSLLVRQTNESALCTNGACESSLIPLNRSFIVPGGRYREIYYWDSFWILEGLLKSELYLYAYNLLENFMDLIEKFGFLPNGGRSYYLNRSQPPVFVQMLNAYIQVTGNVSILTRALPIAETELQWWRTNRTISVTSPYTGTNYSVARYFVTNSAPRPEGYVEDITTAFGGNPALNESARSALYAELASGAETGWDYSSRWCKQPLLNLTDNDPALRTLNVRQQIPVDLNSLLCGDHVLLANLYEFYMNSTIGGGSGISSGGGNSTIGMGAWANSTSGSNMTSNSTSSSNMTGLVQSHRMIAKEFEAAINDLMWDKQKLWWYDFNMTANARADVYHPGGLFPLWQNITPSDIVGNDTAAFGVFAGVRYMVGMYPGPPAPASLIQTGLNWDAPNVWPPHVYTGIKALETVLRINPNSSVVPNITLTDFTRIPTGQLGLNQSQLPPQPASALGNGTADLDQAIAQMQKGKPWPTALAIEFANRYLQSAFCSWYSTGGSIPGLLQQLSPQELNLTGSLTTGSQAMGNIFEKFNLTNVDAAGGGGEYTVQIGFGWSNGVILHTAGEYGQYLVQPSCPLIAIHETANATSTNATKSNNTMVFSGYRLPHD

SEQ ID NO: 211 - protein, 734 aa, Dioszegia cryoxerica
QSSSSSSFSPTPVTTAVPSATAALNQTVSGQGVYPPLQPWCNAGENATYCPGVILQDVQLSGLFPDSKTFVDKPTNGTQNATQQAFQQLGNNITLGQLAQFVNTSFRGEGLELSQVPINGFVANPAAVNKVSNPLYRGWVSTVNSYWSLLIRETNQSAVCTTQCESSLIPLNYTIVVPGGRYREIYYWDTFWILEGLLKSELYTYAWDVLQNFMDFVDVYGFIPNGGRKYYLNRSQPPVFIQMLDAYVKATGNVTILERALPLASEEMRWWINNRTTQVTSPFTGITRRVYVFNVTNSAPRPEGYVEDYEAAFGAQPPLTEAQRGALYAELATGAESGWDYSSRWCKQPVINVTDNLPALRTLNGRSIVPVDLNSLQAGNHALLARLYEVYINASTTSNTTAAQTIRANATQEIALHKTLANDYSQAVLDLHWDPARAWFYDFNLTSNSRESLYTPAGTFALWQNITPPGLEGNDTAALRIASGARYLLGRYGGIQGVSSLLVTGLNWDFPNSWPPHTYTSIKAFQTLGRLVGNASIVGNATIPFSQVATNQLGLNETQLPPQDPALQGNASLTVPSARNVSWPLALEIEYASRYMQGAFCSWYSTGGSISGLLTQLPVSQLNATGTYQAGQTGQMFEKFNATDIDAAGGGGEYTVQIGFGWTNGVVLWLADNFGQYLPQPTCPLVVLSLTNLNSTTAGNSTNGTSPAAPGNATSLVAVSELQGIWEGQRVSRD

SEQ ID NO: 212 - protein, 1020 aa, Talaromyces funiculosus
LPFNERVDQVLRSYEVTSKLDSRSTKPSKHGHTYQTQFLGVTWDQRNWRLQSTVLDQGHYESRGSIANGYIGLNVAGAGPLFELDSPVDGDVINGWPLFSRRQTFAGLAGFYDLQPRTNGTNFPWLSQYGDDSAISGVPHWGGMVLDLGDGEYLDATVDNSTISDYTTTYDYKAGVLSWDYKWTPKNANGSFGISYKIFANKLDVNQAVVQLSITPSTNGSASVVNVIDGYAAVRTDFVSSGNESDVVYTAVKPNGVTNVTAWIYTALDGDDAFDISSAALVNDKPYVHQNDSSIAQSVNVTFTAGTTITINKFVGAASTDAFPDPQSTAREAALSARRRGFDDLFRSHISEWAQVMPDDSVDDFTLANGTLPNDTFIIESAVMAVVNPYYLLQNTVGPNALRRVNNAPVNDWSIPVGGLTSDSYAGQIFWDADVWMQPGLVAAFPESAKRITNYRAAKYSQALENAKTAYTSSQNQTWFSPDAAIYSWTSGRVGNCTATGPCWDYEYHLNGDIGISLVNEWVVSGDNETFKNKHFPIYNSIATLYGDLLKKNGSYYTLTNMTDPDEYANNVDAGGYTMTLISQTLSNANAFRKQFGMNENTTWTEMADNILLIRENDVTLEYTTMNNSVAVKQADVILSTFPLDYTKNYTTSAALNDLDYYALKQSPDGPGMTYAIFSIVANDVSPSGCSAYTYAQYSYDPYIRGPFFQFSEQLLDDYTINGGTHPAFPFLTGHGGANQVVLYGYLGLRLLPDDMLHIDPNLPPQIPSIKYRTFYWRGWPIQAASNYTHTTIQRATTVAPLSTADPTYANKSIHVSVGHNTVNSTTYSLSANGSALVVPNRQIGSINTVAGNVVQCKSVLSTDAYQKGQYPISAVDGAASTKWQPEFAANISSLTVDLTGSNVSSVSGFYFDWAQAPPTNITVLLHNSSSAALASSGDKPGSSAVTLNITISNPYNASTYNANIIALPSSNSTNYTFPAPVPKPRYATLFVQGNQALDETDTKSGNGTGATVAEWAILS

SEQ ID NO: 213 - protein, 1063 aa, Hamigera avellanea
ASPKSRINQCLKKHAGQGSHDDETSSNVYQTRFPGVTWDEDNWSLTTSVLDQGHYQSRGSVANGYLGINVASVGPFFELDIPLNGDVINGWPLYSRRQTFATISGFFDSQPETNGTNFGWLNQYGGESVISGVPHWSGLILDLGDGTYLDSTVDNATLSGFTSSYDFKAGVLSWSYQWTPEGKHGSYDITYRLFTNKLYVNQAVVDMEIVPTVAGKASVVNVIEGSSAVRTDFVESGEDDGAIFSAVRPWGISNVTAYFYANLTVSDNVDLSSRTLVSNKPYVSTNESSIAQSVDVQFIPGKSVRITKFVGAASTDAFANPQETAKRAASTAQTNGYLKSLNSHIAEWASVMPDDSVEDFSLPETGKLPADEHIIESAIISVTNTYYLLQNTVGKNAIKASSDAALNMDSISVGGLTSDSYAGLIFWDADIWMQPGLVASHPEAAEVFTNYRVAKYPQAVKNIETAFASSKNQTNFSPSAAAYPWTSGRYGNCTGTGPCFDYQYHLNGDIGLSMINQWVVSGDTQTFREKHFPIYDSAATFFSNLVERNGSTWTLTNMTDPDEYANHIDAGGYTMPLIAETLLYANSFRKQFGVEPNETWNEIAENVLVLRTNGVTLEFTSMNGSAPVKQADVVLVTYPLDYNNNYSPEDSLNDLDYYANKQSEDGPAMTWAIFSVVANEASPSGCSAYTYAQYAYYPYARAPFFQLSEQMIDDASINGGTHPAYPFLTGHGGANQVNLMGYLGLRLLPDNVIHVDPNLPPQIPHLKYRTFYWRGWPMSAASNYTHTTIQRAVNVPALSTADQKFANVSIPVHVGPETNATVYRLPVNGTLTIPNRQIASKNTVAGNLIQCRPVESQNDFQPGQFPISVVDGASSTRWQPKHADNVSAVTVTFADEEVGSLVSGFYFDWAQAPPVDAAVIFHNSSLENPASAFSFASNSSSSEYSVITTLKNVEQSDPYDPESDKLDIIAIPTGNTTKVTLPSAVPAARYATLFITGNQALGPEDIAAKNGTGATVAEWAIVGQTSSATSKRSIQTRKLQVRSGAALSGLGFAQRRRQSAEMY

SEQ ID NO: 214 - protein, 1020 aa, Talaromyces ruber
LPFNERVDHVLRSHDLTSRLHSRSAKPSNHGGTYQTQFTGVTWDQRNWRLQSNVLDQGHYESRGSIANGYIGLNVAGAGPFFELDTAVDGDVINGWPLFSRRQTFAGLAGFYDLQPTTNGSNFPWLDQYGDDSVISGVPHWGGLVLDLGNGEYLDATVDNSTISDYSTTYDYKAGVLSWHYKWTPKNANGSFEIKYKIFANKLDVNQAVVQLSITPSANGSASVANVIDGYSAVRTEFVASGNESDAIFTAVKPVGVSNVTAWIYAALDGDDAFDFSSATLVNDKPYVHQNDSSIAQSVNVTFTAGTTITINKFVGAASTDAFPDPQSTAREAALKARRRGFDDLFRSHISEWAQVMPDDSVDDFTLANGTLPNDPFIIESAVMAVVNPYYLLQNTVGPNALRRVNNAPVNDWSIPVGGLTSDSYAGQVFWDADVWMQPGLVAAFPESAKRITNYRTAIYSQALENAKTAYTSSQNQTSFSSDAAIYSWTSGRYGNCTATGPCWDYEYHLNGDIGISLVNQWVVSGDNDTFKNTHFPIYNSIATLYGDLLKKNGSYYTLTNMTDPDEYANNVDAGGYTMTLISQTLSNANAFRKQFGMDENTTWTDMADNVLLIRENDVTLEYTTMNNSVAVKQADVILSTYPLDYTKNYTTSAALNDLDYYALKQSPDGPGMTYAIFSIVANDVSPSGCSAYTYAQYSYDPYIRGPFFQFSEQLLDDYTANGGTHPAFPFLTGHGGANQVVLYGYLGLRLLPDNVLHIDPNLPPQIPSVKYRTFYWRGWPIQAASNYTHTTIQRATSVAPLSTADQTYANRSISVQVGQNTVNSTTYSLPANGSAIVVPNRQIGSINTVAGNIAQCKSVLSTDAYQPGQYPISAVDGAASTKWQPEFAANISSLTVDLTSSNASTVSGFYFDWAQAPPTNITVLLHNSSNAPLTSSNSNGGNSTVSLNVTISNPYDASAYNANVITLSSSNTTNYTFPAPVSKPRYATLFVQGNQALDETDLKAGNGTGATVAEWAVLS

SEQ ID NO: 215 - protein, 1055 aa, Trichoderma lixii
ATSNNRVSECLGRNGGSSTGVHFSKNVYKTDFAGVTWDEDNWLLSTTELKQGAFESRGSIANGYLGINVASVGPFFELDTEENGDVISGWPLFSRRQSFATIAGFWDSQPVMNGTNFPWISQYGSDTAISGIPHWSGLILDLGGNTYLDATVDNRTISNFRSTYDYKAGVLSWSYKWTPKGNKGSFDISYRIFANKLYVNQAVVDLQVTASKNVEASIVNVIDGFAAVRTDFVESGEDGNAIFSAVRPNGVANVTAYVYADITGSGGVDLSSRKIVHNKPYVHANASSIAQAVPVKFSAGRAVRVTKFVGGASSDAFKNPKQIAKSAAATALKNGYSKSLNSHVTEWAAVMPESSVDSFADPKTGKLPNDNYIIDSAIIAVVNTYYLLQNTVGKNGSKAANGAPVNVDSISVGGLTSDSYAGQVFWDADLWMQPGLLAAHPEAAERIINYRLARYGQAKENVKTSYAGSQNETFFSASAAVFPWTSGRYGNCTATGPCWDYEYHLNGDIGLALVNQWVVNGDTKDFEKNLFPVYDSIAQLYGNLLKPNGTAWTLTNMTDPDEYANHVDAGGYTMPFIAETLQNANTFRKQFGIEQNKTWNDMASNALVLRENGVTLEFTTMNGSAVVKQADVIMVTFPLSYTTNYTTEDALNDLDYYANKQSPDGPAMTYAFFSIVANEISPSGCSAYTYAQYAFKPYVRAPFYQLSEQIIDDSSINGGTHPAYPFLTGHGGANQVVLFGYLGLRLVPDDFIHIEPNLPPQIPYLRYRTFYWRGWPISAWSNYTHTTISRASGVAALDGADQRFAGKTITIHSGPEESPKAYHLPVKGSVVVPNKQIGSQQTYAGNLVQCHAASSPSDYVPGQFPIAAVDGATSTKWQPASADKLSSITVSLDQEDVGSLVSGFHFDWAQAPPVNATIIFHNEAINDPATVLKSQKHNSNYKVVSSLTNIKQSNPYIKTTDLDIIAIPIGNTTNVTLSQPVAASRYASLVIVGNQGLDHADVVGKNGTGATVAEWAIIGHSKGHTGAPGHHGKRKLNLRAAAAMSDPDSFARRRQ

SEQ ID NO: 216 - protein, 1056 aa, Aspergillus cervinus
STFSHKNDRILKGLKRHGDHYSRKSNTNSTDVYQTKFDGVTWDDDNWLLTTTALDQGDFRSRGSIANGYLGINVASVGPFFELDTAENGDVISGWPLFSRRQTFATIAGFFDSQPTTNGSNFPWLYQYGGDSVISGVPHWSGLVLDLGNDTYLDSTVDNQTIENFTSMYDYKSGVLSWSYTWVPAGNKGSFDIVYRLFAHKLNVNQAVVDMEITPSLSFNATVVNILDGYSAVRTDFVESGNDNGAIFTAVRPWGISNVTAYVYANLTGTPNVDLSSRTIVANKPYVHTNASSIAQAVNVSCSPNETVRITKFVGAASSDAFENPQETARQAVSAAIGAGYLRSLGTHIAEWASIFPDDSVDRFTDPATGKLPANKHIINSAIIAVTNTYYLLQNTVGKNAIQAVSGAPVNIDSISVGGLTSDSYAGQVFWDADVWMQPGLAASHPEAAQRITNFRAAKYPQALANIETAFTSSKNQTSFSPSAAAFPWTSGRFGNCTATGPCWDYEYHLNGDIGLSLMYQWIASGDTQTFRETHFPIYDSIATMYSNIVERNGSYWTLKNMTDPDEYANQIDAGGFTMPLISQTLNYANAFRQQFGLDVNQTWSEIANNVLVLNDNGVTLEYTTMNGSTVVKQADVVLDTYPLVYSNNYTSQNSLDDLDYYANQQSPDGPAMTWAIFSIVANDVSPSGCSAFTYHQYSYDPYARAPFFQLSEQLIDDASTNGGTHPAFPFLTGHGGANQVVIFGYLGLRLLPDEAIHIDPNLPPQIPHVAYRTFYWRGWPISAQSNSTHTTISRAMNASPLDTADSRFANVSIPIYVGTESNATVFQLPPTGPLTILNRQNGFNNTIPGNVAQCRPVYSPDDYAPGQFPIAAVDGATSTRWQPSSANTSSVTVTLPDTQINSPVSGFYFNWWQLPPVNATVIFHDDLLENPAATISSSGNSSSYRVVMTLTNIQQSSPYNAQIAALDEITIPTGNTTTVQLTNHAQTSRYATLLISGNQGLGDTQDGVGATVAEWVILGQGQGSSSSNSNGKRKLGARSAAALSNGWTERRRRLI

SEQ ID NO: 217 - protein, 1053 aa, Rasamsonia brevistipitata
LRSEARVAQVVRAYSSSTGVEAGHGNATQYETRFPGVTWDQRHWRLKSTVLDQGHFQSRGSIANGYVGINVASAGPFFELDTPVDGDVINGWPLFSRRQTFATIAGFYDEQPRTNGSNFDWLYQDGGESVISGVPHWSGLILDLGDGTYLDATVDDSTISDYSTVYDYKAGILSWSYKWTPKSSKGSFKISYRLFAHKLNINQAVVRMEITPSADTDATVVNVLDGYSAVRTDFVGSGKDGDAVYSAVSPWEVQNVTAYVYAVLDGSDGVDLSTLSLVNGKPYVHTNESSIAQSVNVRFRAGKTVTVTKFVGAASTDAFPDPQQTAREAALAAKEEGYDALLRSHVAEWAAVMPEESVDDFTYHNGTLPGDDFIVESAIMAVVNPYYLLQNTVGENALREVSHAPVNEWSISVGGLTSDSYAGLIFWDADLWMHPGLAVAFPQAATRITNYRVAKYEQARQNAKTSFTGSKNQTWFSDSAAVYPWTSGRYGNCTGTGPCWDYEYHLNGDIGLSLINEWVASGDTKTFQESYFPIYDSIATLYADLLQQNGSHWTLTNMTDPDEYANAVDAGGYTMPLIAQTLLYANSFRQQFGAQPNSTWTEMASNILFLRENDITLEYTTMNNSVQVKQADVVLVTYPLEYTTNYNAGNALTDLDYYALKQSPDGPAMTYAIFSIVANEVSPSGCSVYTYAQYSYDPYVRPPFFQLSEQLVDDYTLNGGTHPAYPFLTGHGGANQVVIFGYLGLRLLPDNVIHIDPNLPPQIPQVKYRTFYWRGWPIQAYSNYTHTTIGRAADVLALDTADQRFANTTIPVQVGSGSNATVYQLPIDGVLTVANRQVASTNTVAGNLAQCQPVDSSDSYVPGQYPLAAVDGAASTKWQPSFAANVSSVTVSLPESESGTLVSGFYFDWAQAPPVNATVVFHNNTVENPTRYMSSPTFVTHIDNITLSSPYNAEANPAATILLPSSNTTNVTLAHPMPVPRYATLFITGNQALSESEVQAQNGTGATVAEWAILASNPETGSSKRNLQLRGVGRSALAGLPRRANRKERRTDV

SEQ ID NO: 218 - protein, 1034 aa, Acremonium curvulum
LEERVSQTLNRHGVRSSYNRRADNGDQNRISNTSHPYIYQTSFEGVTWDSRNWRLQGTVLDQGHYQSRGSIANGYFGINVASAGPFFELDTPVDGDVINGWPLFSRRQTFAGLAGFWATQPTTNGTNFPWLYQYGDESPISGIPHWGGLVLDLGDDVYLDATVDNKTIKNYRTTFDYKAGVLTWDYTWSPKKRGSGSFDITYSLFANKLDINQAAVRLSIRPSRDTKAKVVNVLEGYAAVRTDFVDSGKDGDAIYSAVRPVGVNNVTAYVYAVLDADSAVDLSSAKVIDDAPYLYTNKSTIAQSVNVEFKANQNVTITKFVGIASTDAFPKPRDVAKQAAFAGKRRGYDDALRSHVSEWAQVMPDDSVDDFSSDNGTLPDDGFIIESSIMAVVNPFYLLQNTVGANALRRVNNAAVNDYSISVGGLTSDSYAGLVFWDADIWMQPGLAAAFPEAAQRITNYRVALYPQAKRNIKTAFQSSKNKTRFSDDAALYPWTSGRWGNCTASGPCFDYEYHLNGDIGIAFVNEWITSGDEKAFEEKYFPIYDSIATAFANLLQKNGTQWTLTNMTDPDEYANHVDAGGFTMPLISQTLTYANLFRKKFGKEENDTWADMAENVLILRENDVTLEYTAMNNSVEVKQADVVLNTFPLDYTRDYAPSAALNDLDYYALKQSPDGPAMTYAIFSIVANEVSPSGCSAYTYAQYSYSPYLRGPFHQLSEQLTDDFTTNGGTHPAYPFLTGHGGANQVVLFGYLGLRIVPDDKIHVDPNLPPQIPQVKYRTFYWHGWPIAAKSNYTHTTISRATTIKELDTANKKYANASIQVVVGSGKSAKTYKLPANGSSIVVANRKIGTVNTLEGNMIQCQPAQSFDTFVPGQFPISINDGAASTKWQPEFANNISAVTVTVPASKSKKISGFYFDWAQAPPTNATVVLHDEKMDNPTMVLLPVSKDDDKKGSVARVNVTISEPWSAKDKSNFVIGLQGGNTTNFTFSEPVAAKRYATLFIQGNQALDKVDIKYKNGTGATVAEWGILSDDA

SEQ ID NO: 219 - protein, 1015 aa, Talaromyces piceae
ARVDQVLQARDTHHPSLHSSSSYQTRFDGVTWDQRNWRLQSRVLDQGHYQSRGSVANGYLGINVASAGPFFELDTPVDGDVINGWPLFSRRQTFAGLAGFYDRQPTTNSTNYGWLNQYGDESVISGIPHWSGLVLDLGDGHYLDATVDSSTISDYTTTYDFKAGVLSWDYNWAPRQHGGGNSSFHISYQLFAHKLDINQAVVKLSITPSASGNASVVNVIDGYSAVRTEFVKSGTDGDAVYSAVSPVGVSNVTAWVYTVLDGDEAFNLSSAQLVTGKPYVYQNDSSIAQSVNVEFRAGETVTITKFVGAASTDAFADPRQTARDAALLAKKKGFDDLLRSHVSEWAQVMPDGSVDDFTREDGTLPDDEFIIESAVTAVVNPFYLLQNTVGKNALQRVSNAPVNDWSIPVGGLSSDSYAGLIFWDADVWMQPGLVAAFPESAQRITNYRAAMYRQARANIQSAFASSQNKTVFSPDGAIYPWTSGRYGNCTGTGPCFDYEYHLNGDIAISLVNQWVVSGDTETFKNEHFPIYDSIATMYADVLKKNGSFYTLTNMTDPDEYANNKDAGGFTMPLIAKTLLNANDFRKQFNMEENSTWNEKAASVQILRENDVTLEYTTMNNSVAVKQADVVLMTFPLDYTANYSSSSALNDLDYYALKQSPDGPGMTYAIFSIVANQVSPSGCSAYTYAQYSYYPYARAPFFQLSEQLLDDYTANGGTHPAYPFLTGHGGANQVVLYGYLGLRLVPDETLYIDPNLPPQIPQVKYRTFYWRGWPIQAASNYTHTTIRRATTVAPLDTADEKYTDEAITLHVGQQSDGNKYQLPADGTPVTVANRRVSSVNTVKGNMIQCQPVQSTASIQPGQFPIAAVDGAASTKWQPEFAANASSLTVEIPSSGKKRKTVSGFFFDWAEAPPTNATVVLHNNPVSEPTLSSFEAGKDGVVLRAFDIEISSPYNASTYADEIIIPQGNSTNYTFSHPVPAPRFATLFVQGNQALDKVDVENKNGTGPMVAEWVILE

SEQ ID NO: 220 - protein, 1022 aa, Penicillium sp.
LPLEERVDRVLRSYSVGSGLEARHSKYTYQTQFDGVTWDQQNWRLESTVLDQGHYSSRGSIANGYIGLNVAGAGPFFELDAPVDGDVINGWPLFSRRQTFAGLSGFYDVQPTTNGSNYPWLDQYGYDSVISGIPHWGGLVLDLGNGDYLDATVDNSTISDYTTTFDYKAGVLSWDYNWTPKNTSFGISYKIFSSKLDINQAVVQLSITPSANGTASVANVIDGYAAVRTEFVTSGNDSDALFTAVKPTGINNVTAWIYAVLDGDDAFDFSSATLVNNKPYINQNDSSIAQAVDVEFTADSTVTITKFVGAASTDAFADPQKTAKDAALAARIKGFEDLLRSHVSEWAQVMPDDSVDDFSLADGTLPDDIFIIESSVMAVVNPYYLLQNTVGENALRRVNDAPVNIWSIPVGGLTSDSYAGQIFWDADLWMQPGLVAAFPESAKRISNYRVAKYPEALANTNTSFAGSQNHTTFSSDAAIYSWTSGRYGNCTATGPCWDYEYHLNGDIGISLVNQWVTSGDTETFQNDLFPIYNSVATLYADLLKLNGSYYTLTNMTDPDEYANNVDAGGYTMTLISKTLSNANAFRKHFGLDQNSTWTEMAENVLVIRENDVTLEYTTMNNSVAVKQADVVLSTFPLDYTMNYTTSDAVNDLDYYALKQASDGPGMTYAIFSIVADKVSKSGCSAYTYAQYSFDPYIRSPFFQFSEQLDDDYTTNGGTHPAFPFLTGHGGANQVVLYGYLGLRLLPDNVLHIDPNLPPQIPSVKYRTFYWHGWPIQANSNYTHTTIRRATTTAPLSTADQTYSNTSITVQVGTSNGTTYSLRVDGTPLTIKNRRIGSVQTISGNIAQCQPVQSPDSYEPGQYPLSVVDGASSTKWQPESAANISSVTVTLGSSYSPGNSSNATASSILGFYFNWAQAPPDNITVVLHNASIPYLNASLSSLSNTTTTTSLNITVSNPYDSSADEKIIVLPSSNTTNYTFPSPVPVPRFATLFIQGNQGLDQTDLEYGNGTGATVAEWAILSA

SEQ ID NO: 221 - protein, 1020 aa, Talaromyces aurantiacus
LPFQDRVDQVLRSYSAKTLDIRSAKSSSKHGNTYETQFPGVTWDQRNWRLQSTVLDQGHYESRGSIANGYIGLNVAGAGPFFELDTPVDGDVINGWPLFSRRQTFAGLAGFYDLQPTTNGSNFPWLDQYGDDSAISGVPHWGGLVLDLGDGQYLDATVDNSTVSDYKTTYDFKAGVLSWDYKWTPKSSNVSFGISYKVFANKLDVNQAVVQLSITPSANGSASVVNVIDGYSAVRTDFVSSGNESDAIYTAVKPLGVSNVTAWIYATLDGDDAFDFSSATIVNNKPYVHQNDSSIAQSVNVTFTAGTTVTINKFVGAASTDAFPDPRSTAKEAALAGRRRGYDDSFRAHISEWAQVMPDDSVDDFTLANGTLPNDTFIIESAVMAVVNPYYLLQNTVGPNALRRVNNAPVNDWSISVGGLTSDSYAGQVFWDADVWMQPGLVAAFPESAKRITNYRAAIYSQALANAKTAYTSSQNQTSFSSDAAIYSWTSGRYGNCTATGPCWDYEYHLNGDIGISLVNQWVASGDNETFKNTHFPIYNSIATLYGDLLKKNGSYYTLTNMTDPDEYANNVDAGGYTMTLISQTLSNANAFRKQFGMDENTTWTEMADNVLLIRENDITLEYTTMNNSVAVKQADVILSTYPLDYTKNYTTSAALNDLDYYALKQSPDGPGMTYAIFSIVANDVSPSGCSAYTYAQYSYDPYIRGPFFQFSEQLLDDYTANGGTHPAFPFLTGHGGANQVVLYGYLGLRLVPDDKLHIDPNLPPQIPSVKYRTFYWRGWPIQAASNYTHTTIQRATRVAPLSTADMTYANKSISVQVGQNTANSTTYSLPVNGSALVISNRQIGSINTVQGNIAQCKSVQSMNGYQPGQYPISAVDGAASTKWQPEFAANVSSLTVDLTSSNASSVSGFYFDWAQAPPVNVTVVLHNSTSASLTSSAAQNGSSTVSLNITISNPYNASSYDANVIELSSSNTTNYRFPAPVPKPRYATLFVQGSQALDETDMKAGNGTGATVAEWAILS

SEQ ID NO: 222 - protein, 1016 aa, Talaromyces pinophilus
LPFNERVDQVLRSYSPKNLESRSTKHGNSYQTQFSGVTWDQRNWRLQSTVLDQGHYESRGSIANGYIGLNVAGAGPFFELDTAVDGDVINGWPLFSRRQTFAGLAGFYDLQPTTNGSNFPWLSQYGDDSAISGVPHWGGLILDLGDGEYLDATVDNSTISDYTTTYDYKAGVLSWDYKWTPKNSKASFGINYKIFANKLDVNQAVVQLSITPSANGSGSVVNVIDGYSAVRTDFVSSGNESDVIYTAVKPVGVNNVTAWIYAALDGDEAFDFSSAELVNDKPYVHQNDSSIAQSVNVAFTAGTTITINKFVGAASTDAFPDPQSTAREAAMTARRRGFDDLFRSHVSEWAQVMPDDSVDDFTLANGTLPNDTFIIESAVMAVVNPYYLLQNTVGANALRRVNNAPVNDWSIPVGGLTSDSYAGQIFWDADVWMQPGLVAAFPESAKRITNYRTAKYSQALENAKTAYTSSQNQTSFSSDAAIYSWTSGRYGNCTATGPCWDYEYHLNGDIGISLVNQWVVSGDNETFKNTHFPIYNSIATLYGDLLKKNGSYYTLTNMTDPDEYANNVDAGGYTMTLISQTLSNANAFRKQFGMDENTTWTEMADNILLIRENDVTLEYTTMNNSVAVKQADVILSTFPLDYTKNYTTSAALNDLDYYALKQSPDGPGMTYAIFSIVANDVSPSGCSAYTYAQYSYDPYIRGPFFQFSEQLLDDYTANGGTHPAFPFLTGHGGANQVVLYGYLGLRLLPDDMLHIDPNLPPQIPSVKYRTFYWRGWPIQAASNYTHTTIQRATSVAPLSTADPAYANTSISVSVGQNTANSTTYSLPVNGSAIVVPNRQIGSINTVAGNIAQCVSVLSTDAYQPGQYPISAVDGAASTKWQPEFAANVSSLTVDLTSSNASSVSGFYFDWAQAPPTNITVLLHNSSSAALTSSSTHGGSSSVSLNITISNPYDASSYDANVIALSSSNTTNYTFSAPVAKPRYATLFVQGNQALDETDTKAGNGTGATVAEWAILS

SEQ ID NO: 223 - protein, 1069 aa, Talaromyces leycettanus
TSANARINRCVKKHAGGKTPSGPSNNTYQTRFPGVTWDQDNWCLSTTTLDQGHYESRGSVANGYLGINVASVGPFFEFDTPVDGDVINGWPLFDRRMSFATISGFWDQQPTTNGSNFPWLYQYGGESVISGVPHWSGLILDLGDNTYLDATVDSRTISGFSTTYDFKSGVLSWSYQWTPAGNMGSYNITYRLFAHKLYVNQAVVDMEVVSSTEAKATVVNVIDGASAVRTDFVESGQDDGAIYTAVRPWGIANVTAYIYANITGSDNVDMRSRALVTNKPYVNGNASSITQAVNVHFTPGKSVRITKFVGGASSDAFSNPQQIAKQACSTAQANGYVKSLRSHVAEWASVMPDDSVDDFTFPSNGTLPADEYIIESQIISVANTYYLLQNTVGKNAINASSSTELNKDSIAVGGLTSESYAGMIFWDADVWMQPGLVASHPEAAQRITNYRVAKYPQAKANVATAYQSSKNQTNFSPDAAVYSWTSARYGNCTATGPCWDYEYHLNGDIGLSIINQYVASGDTQTFKEKLFPVFDSVATLYSNIVQKNGSSWTLTNMTDPDEYANQVDAGGYTMPLIAQTLLYANSFRQQFGLETNDTWNEIAQDVLVIRENGVTLEFTTMNGSAVVKQADVVLDTYPLGYTHNYGPTDALNDLDYYANRQSPDGPAMTWAIFSVVANQISPSGCSAYTYAQYAFSPYARAPFYQLSEQLIDDASLNGGTHPAYPFLTGHGGALQVNLFGYLGFRYLPDNVIHIDPNLPPQIPHITYRTFYWRGWPITAASTYTHTTLSRAWNVSSLDSADPKFANASIPVHVGLESNVTVYRLPVNGTLTVPNRMVGSKNTLAGNMVQCRPVQSMDGYQPGQFPISVVDGASSTKWQPLYSANVSSVTVTLSSSAVGKSVNGFYFDWAQNPPVNAAVVFHNSSFAQNPATTFSFDNPSASGNLYSVVSVLKDIQLSDPYDPATTDLDVIAIPKGNTTNVTLSSPVPAARYATLFIQGNQANSPAEVAAKNGTGATVAEWAILGQEVQNNGYGDQIEARRLDVRGAAALSGMGSFTQRRKRKMILPRFD

SEQ ID NO: 224 - protein, 1016 aa, Talaromyces variabilis
ALSPGARVNQVLRAHNSLPPSLTDNSTGSSYKTRFDGVTWDQRNWRLQSRVLDQGHYEARGSVANGYIGINVASAGPFFELDTPVDGDVINGWPLFSRRQTFAGLAGFYDLQPTTNSTNYGWLNQYGDESVISGIPHWAGLVLDLGNGDYLDATVDNSTISDYTTTYDYKAGILSWDYKWTPRQNSSSFRISYQLFANKLDINQAVVKLSITPSKSGNASVVNVIDGYSAVRTDFVKSGSDGNAIYTAVSPVGVSNVTAWVYAVLDGDKAFDLSSPSRVTGKPYIHQNESSIAQAVNVEFSAGKTVTIAKFVGAASTDAFSNPQKKAKTAALDGKKKGFEDLLRSHVSEWAQVMPDDSVDDFTLANGTLPDDSFIIEQAVTAVVNPYYLLQNTVGKNALQRVNNAPVNDWSIPVGGLSSDSYAGMIFWDADVWMQPGLVAAFPESAKRITNYRAAKYQQAIANVKTAYSSSQNETVFSPNAAIFPWTSGRYGNCTGTGPCWDYEYHLNGDIAISLVNQWVVSGDTETFQNEHFPIYNSIATVYGDLLKKNGSYYTLTNMTDPDEYANNKDAGGYTMPLIANTLIKANEFRRQFGMAENATWNEMAENVLIIRENDVTLEYTTMNNSVAVKQADVVLRTFPLDYTTNYSSSAALNDLDYYALKQSPDGPGMTYAIFSIVANEVSPSGCSAYTYAQYSYDPYARAPFFQLSEQLIDDYTTNGGTHPAYPFLTGHGGANQVVLYGYLGLRLVADEILHIDPNLPPQIPQVTYRTFYWRGWPIQAASNYTHTTIHRATTVAPLDSAEKKYAKSAISVQVGQQANSTTYKLPADGTPLTVANRKVGSTNTIKGNIAQCQSVQSVDSYQPGQYALAAVDGAASTKWQPEFAANVSSLTVSIPSGKTSVSGFYFDWAQAPPSNATVVFHNNSVSNPTFSSFGSRKGARITHIDVKLSNPYNASSNADAIVIPSGNTTNFTFSNPVPAPRFATLFVQGNQGLDKVDVQNGNGTGATVAEWAILE

SEQ ID NO: 225 - protein, 1050 aa, Aspergillus niger
LPGKNARISASLKRHAGRDVPQTALNSTNVYQTKFSGVTWDEDHWLLTTTTPDQGHYQSRGSVANGYLGINVANIGPFFELDEPVNGDVINGWPLYSRRQSFATISGFWDRQAHTNGSNFPWLSQYGDDSVISGVPHWSGLILDLGDDTYLDATVDNRTISNFKSTYDFKSGVLSWSYTWTPQGNKGSYAITYRLFAHKLYVNRAVVDMEITPLTNGNATVVNVLDGYAAVRTDFVASGQEEGAIFSAVRPWGVNNVTAYVYATLDGSDSVDLSSRRIVTDKPYVSTNSSSVAQAVDVMFTANETVRITKFVGGATTDYFLATQETAKAACLAGLADGYVKSLQSHVGEWATIMHDHSVDRFTDPATGKLPEDSHIVDSAIIAVTNTYYLLQNTAGTNAIVAAGGIPVNVDSCAPGGLTSDSYGGQIFWDADLWMQPGLVASHPESAQRFTNYRIALHYQAQANIETAFTGSKNQTSFSSSAAIYPWTSGRFGNCTATGPCWDYQYHLNGDIGLAMINQWVASGDTAWFKNYLFPIYDAAATLYSELVERNGSSWTLTNMTDPDEYANSINAGGYTMPLIAETLQNANKLRKQFGLEPNETWDEIAEDVLILRENGVTLEYTSMNGSAVVKQADIVLNTFPLTYESDNYTATNSLTDLDYYANKQSADGPAMTYAIFAIVASDVSPSGCSAFTYHQYSYAPYARGPWYQLSEQMIDDASINGGTHPAFPFLTGHGGANQVALYGYLGLRLHPDDTIYIDPNLPPQIPHITYRTFYWHGWPISAWSNYTHTTIQRDSSLAPLASADLLFSNVSIKVQVGQSTASADEATIYYLPLSGALTVPNRMIGSVNTTPGNQVQCHPVYSPDAYEPGQFPISAVDGATSTKWQPSTSDLTSLTVTLSTTAEAGAEEVSGFYFDWSQAPPENLTVIFHDSPIGNPSTVFAAAGSNSTGYRVITSMSNIVQSKPYNAISAEELNVVSIPTANTTTITLDAPVQKARYATLLIAGNQANETAGATVAEWVILGQNSTSSSSAQAKRKMSARSKATLAQLS

SEQ ID NO: 226 - protein, 1056 aa, Trichoderma reesei
TTLVDRVTKCLSRHDGSDAESHFSKNVYKTDFAGVTWDEDNWLLSTTQLKQGAFEARGSVANGYLGINVASVGPFFEVDTEEDGDVISGWPLFSRRQSFATVAGFWDAQPQMNGTNFPWLSQYGSDTAISGIPHWSGLVLDLGGGTYLDATVSNKTISHFRSTYDYKAGVLSWSYKWTPKGNKGSFDISYRLFANKLHVNQAVVDMQVTASKNVQASIVNVLDGFAAVRTDFVESGEDGSAIFAAVRPNGVANVTAYVYADITGSGGVNLSSRKIVHNKPYVHANASSIAQAVPVKFAAGRTVRVTKFVGAASSDAFKNPKQVAKKAAAAGLSNGYTKSLKAHVEEWATVMPESSVDSFADPKTGKLPADSHIVDSAIIAVTNTYYLLQNTVGKNGIKAVDGAPVNVDSISVGGLTSDSYAGQIFWDADLWMQPGLVAAHPEAAERITNYRLARYGQAKENVKTAYAGSQNETFFSASAAVFPWTSGRYGNCTATGPCWDYEYHLNGDIGISLVNQWVVNGDTKDFEKNLFPVYDSVAQLYGNLLRPNKTSWTLTNMTDPDEYANHVDAGGYTMPLIAETLQKANSFRQQFGIEQNKTWNDMASNVLVLRENGVTLEFTAMNGTAVVKQADVIMLTYPLSYGTNYSAQDALNDLDYYANKQSPDGPAMTYAFFSIVANEISPSGCSAYTYAQNAFKPYVRAPFYQISEQLIDDASVNGGTHPAYPFLTGHGGAHQVVLFGYLGLRLVPDDVIHIEPNLPPQIPYLRYRTFYWRGWPISAWSNYTHTTLSRAAGVAALEGADQRFARKPITIHAGPEQDPTAYRLPVKGSVVIPNKQIGSQQTYAGNLVQCHAASSPNDYVPGQFPIAAVDGATSTKWQPASADKVSSITVSLDKEDVGSLVSGFHFDWAQAPPVNATVIFHDEALADPATALASAHKHNSKYTTVTSLTNIELSDPYVSTKDLNAIAIPIGNTTNVTLSHPVAASRYASLLIVGNQGLDPVDVKAKNGTGATVAEWAIFGHGKEHSGKPSSHSKRRLNVRTAATLSNPRSFMRRRL

SEQ ID NO: 227 - protein, 19 aa, Saccharomyces cerevisiae
MLSLKTLLCTLLTVSSVLA

SEQ ID NO: 228 - DNA, 185 bp, Saccharomyces cerevisiae
agtgcttttaactaagaattattagtcttttctgcttattttttcatcatagtttagaacactttatattaacgaatagtttatgaatctatttaggtttaaaaattgatacagttttataagttactttttcaaagactcgtgctgtctattgcataatgcactggaaggggaaaaaaaaggtg

SEQ ID NO: 229 - protein, 555 aa, Pycnoporus sanguineus glucoamylase
QSSAVDAYVASESPIAKQGVLNNIGPNGSKAHGAKAGIVVASPSTENPDYLYTWTRDSSLVFKLLIDQFTSGDDTSLRGLIDDFTSAEAILQQVSNPSGTVSTGGLGEPKFNIDETAFTGAWGRPQRDGPALRATSIIRYANWLLDNGNTTYVSNTLWPVIQLDLDYVADNWNQSTFDLWEEVDSSSFFTTAVQHRALREGATFASRIGQSSVVSGYTTQADNLLCFLQSYWNPSGGYVTANTGGGRSGKDSNTVLTSIHTFDPAAGCDAATFQPCSDKALSNLKVYVDAFRSIYTINNGIASNAAVATGRYPEDSYMGGNPWYLTTSAVAEQLYDALYVWDQLGGLNVTSTSLAFFQQFASGLSTGTYSASSSTYATLTSAIRSFADGFLAINAKYTPADGGLAEQYSRNDGTPLSAVDLTWSYAAALTAFAAREGKTYGSWGAAGLTVPASCSGGGGATVAVTFNVQATTVFGENIYITGSVAALQNWSPDNALILSAANYPTWSITVNLPANTVVQYKYIRKFNGQVTWESDPNNQITTPSGGSFTQNDVWR

SEQ ID NO: 230 - protein, 599 aa, Trichoderma reesei
SVDDFISTETPIALNNLLCNVGPDGCRAFGTSAGAVIASPSTIDPDYYYMWTRDSALVFKNLIDRFTETYDAGLQRRIEQYITAQVTLQGLSNPSGSLADGSGLGEPKFELTLKPFTGNWGRPQRDGPALRAIALIGYSKWLINNNYQSTVSNVIWPIVRNDLNYVAQYWNQTGFDLWEEVNGSSFFTVANQHRALVEGATLAATLGQSGSAYSSVAPQVLCFLQRFWVSSGGYVDSNINTNEGRTGKDVNSVLTSIHTFDPNLGCDAGTFQPCSDKALSNLKVVVDSFRSIYGVNKGIPAGAAVAIGRYAEDVYYNGNPWYLATFAAAEQLYDAIYVWKKTGSITVTATSLAFFQELVPGVTAGTYSSSSSTFTNIINAVSTYADGFLSEAAKYVPADGSLAEQFDRNSGTPLSAVHLTWSYASFLTAAARRAGIVPPSWANSSASTIPSTCSGASVVGSYSRPTATSFPPSQTPKPGVPSGTPYTPLPCATPTSVAVTFHELVSTQFGHTVKVAGNAAALGNWSTSAAVALDAVNYRDNHPLWIGTVNLEAGDVVEYKYIIVGQDGSVTWESDPNHTYTVPAVACVTQVVKEDTWQS

SEQ ID NO: 231 - protein, 633 aa, Bacillus amyloliquefaciens
GPAAANAETANKSNKVTASSVKNGTILHAWNWSFNTLTQNMKDIRDAGYAAIQTSPINQVKEGNQGDKSMRNWYWLYQPTSYQIGNRYLGTEQEFKDMCAAAEKYGVKVIVDAVINHTTSDYGAISDEIKRIPNWTHGNTQIKNWSDRWDVTQNSLLGLYDWNTQNTEVQVYLKRFLERALNDGADGFRYDAAKHIELPDDGNYGSQFWPNITNTSAEFQYGEILQDSASRDTAYANYMNVTASNYGHSIRSALKNRNLSVSNISHYASDVSADKLVTWVESHDTYANDDEESTWMSDDDIRLGWAVIGSRSGSTPLFFSRPEGGGNGVRFPGKSQIGDRGSALFKDQAITAVNTFHNVMAGQPEELSNPNGNNQVFMNQRGSKGVVLANAGSSSVTINTSAKLPDGRYDNRAGAGSFQVANGKLTGTINARSAAVLYPDDIGNAPHVFLENYQTGAVHSFNDQLTVTLRANAKTTKAVYQINNGQQTAFKDGDRLTIGKGDPIGTTYNIKLTGTNGEGAARTQEYTFVKKDPSQTNIIGYQNPDHWGQVNAYIYKHDGGRAIELTGSWPGKAMTKNANGMYTLTLPENTDTANAKVIFNNGSAQVPGQNQPGFDYVQNGLYNNSGLNGYLPH

SEQ ID NO: 232 - DNA, 700 bp, Saccharomyces cerevisiae
cacccatgaaccacacggttagtccaaaaggggcagttcagattccagatgcgggaattagcttgctgccaccctcacctcactaacgctgcggtgtgcggatacttcatgctatttatagacgcgcgtgtcggaatcagcacgcgcaagaaccaaatgggaaaatcggaatgggtccagaactgctttgagtgctggctattggcgtctgatttccgttttgggaatcctttgccgcgcgcccctctcaaaactccgcacaagtcccagaaagcgggaaagaaataaaacgccaccaaaaaaaaaaaaataaaagccaatcctcgaagcgtgggtggtaggccctggattatcccgtacaagtatttctcaggagtaaaaaaaccgtttgttttggaatttcccatttcgcggccacctacgccgctatctttgcaacaactatctgcgataactcagcaaattttgcatattcgtgttgcagtattgcgataatgggagtcttacttccaacataacggcagaaagaaatgtgagaaaattttgcatcctttgcctccgttcaagtatataaagtcggcatgcttgataatctttctttccatcctacattgttctaattattcttattctcctttattctttcctaacataccaagaaattaatcttctgtcattcgcttaaacactatatcaataa

SEQ ID NO: 233 - DNA, 240 bp, Saccharomyces cerevisiae
tcagtactgacaataaaaagattcttgttttcaagaacttgtcatttgtatagtttttttatattgtagttgttctattttaatcaaatgttagcgtgatttatattttttttcgcctcgacatcatctgcccagatgcgaagttaagtgcgcagaaagtaatatcatgcgtcaatcgtatgtgaatgctggtcgctatactgctgtcgattcgatactaacgccgccatccagtgtcga

SEQ ID NO: 234 - protein, 18 aa, Saccharomyces cerevisiae
MQLLRCFSIFSVIASVLA

SEQ ID NO: 235 - protein, 274 aa, Thermomyces lanuginosus
EVSQDLFNQFNLFAQYSAAAYCGKNNDAPAGTNITCTGNACPEVEKADATFLYSFEDSGVGDVTGFLALDNTNKLIVLSFRGSRSIENWIANLNFWLKKINDICSGCRGHDGFTSSWRSVADTLRQKVEDAVREHPDYRVVFTGHSLGGALATVAGADLRGNGYDIDVFSYGAPRVGNRAFAEFLTVQTGGTLYRITHTNDIVPRLPPREFGYSHSSPEYWIKSGTLVPVTRNDIVKIEGIDATGGNNQPNIPDIPAHLWYFQATDACNAGGFS

SEQ ID NO: 236 - protein, 277 aa, Thermomyces lanuginosus
APAPVLRRDVSSSVLSELDLFAQYSAAAYCSSNIGSPGTKLTCSVGNCPRVEAADTETLIEFNESSSFGDVTGYIAVDRTNSLLVLAFRGSSTVSNWEADLDFPLTDASSLCSGCEIHSGFWAAWQTVQASITSTLESAIASYPGYTLVFTGHSYGAALAAIAATTLRNAGYTIQLYDYGQPRLGNLALAQYITAQTQGANYRVTHTDDIVPKLPPELFGYHHFSPEYWITSGDNVTVTTSDVQVVTGIDSTAGNDGTLLDSTSAHDWYIVYIDGCD

SEQ ID NO: 237 - protein, 594 aa, Penicillium emersonii
SAPYDKRDLAQEIWDDIKNAVDCAGCQVVLTALKGVADLGTTALVDVLTEVCNISGKEDSDVCSGIISREGPVLDYVLQHLDIGSHTSQVICASAFGLCQYPEVRPYNLTFPKPKPNTTRPEPSGESPIQVVHFSDTHVDLSYETGSNYNCTKPICCRPYTAEDAPGNTTTPCGPYGNTKCDAPLSLEESMFAAIKALNPQPAFSIYTGDVVAHDIWLVDQNEVIEDLNATYDRMAGLGLVYAAIGNHDTAPVNDLPTSNIPSEYSANWTYEALSYDFTMLTQSASAQTAANYGSYSAIYPGSYGTDLRVISYNSIFYYVDNFWAYQDPMEFDPDGQLAWLINELQEAETAGQRVWIIAHVPTGTSDHFHDYSHYFDQIVQRYEATIAALFYGHTHIDQFQISYSNYSNRAFDTATAIGYIMPSLTPTSGPPTFRVYDVDPKTFAVLDFTNYIANISDPAFQSGPSWQKYYSAKETYGSLLSPPVTDPTAELTPAFWHNVTVAFEQDNATFQEYWARQTRGYDVSSCTGSCITQAICGLRAGDAQYNCVTPTPGFNFAKRDTSNPKQALSHVEKCEGSGLLGLLRRMVADSKSS

SEQ ID NO: 238 - protein, 259 aa, Bacillus thuringiensis
HENDGGSKIKIIHRWSAEDKHKEGVNSHLWIVNRAIDIMSRNTTLVKQDRVAQLNEWRTELENGIYAADYENPYYDNSTFASHFYDPDNGKTYIPFAKQAKETGAKYFKLAGESYKNKDMKQAFFYLGLSLHYLGDVNQPMHAANFTNLSYPQGFHSKYENFVDTIKDNYKVTDGNGYWNWKGTNPEDWIHGAAVVAKQDYSGIVNDNTKDWFVKAAVSQEYADKWRAEVTPMTGKRLMDAQRVTAGYIQLWFDTYGDR

SEQ ID NO: 239 - protein, 297 aa, Pseudomonas sp.
QESPAFIDPASWNTPFNGIAQVACHNCYEKQYANTFSSVLDSVRTLELDFWDQRDAVSGGSPHHWFVRHNPGTLFQSGNDNNCTGDGTGKNDLEACLNDVKNWSDKHPGHFPITLILDKKQGWSKESSGRTPKDFDELVARVFQGKLFTPQDLATHIGSGAGALQGNLKGKSWPTANDLQGKVLLVLNHSENQKLSQYAEARTSKAKVFISPVTNGQNDISGKVSGMSSQSSGYVAMNNMGKGDKSWAKQAFAYSHIGRVWGDDEVSFAQHINQKINLSAYYRFAAQSAGGYRIRPF

SEQ ID NO: 240 - protein, 625 aa, Kionochaeta sp.
AVNPADVLSVVEKRVDPASGLEVRSIWDTIWNDIKSAADCTACEAVLTLLKGVAAFGDNFFVEVLTEICDLSGAEDDDVCSGVLSLEGPIIANDIRKMSIGSKTSELFCITFLGLCSYPAVDAFTVPFPTAKSAATRPVSSGKDPIYVVHYSDIHIDPFYVAGSASNCTKPICCRDYTSASSPGNNNSPAGPYGDHNCDVPISLEDSMYAAIKKLVPDAAFGIFTGDIVDHAVWNTSESQNIIDMNDAYTRMKNSGMLPTIFATAGNHEASPVNSFPPPAIGNESQWVYDTLASDWSQWIGTSGASSVESIGAYSVQYGSTKLRVISLNTNMYYIENFYLYEPTMEQDPAGQFAWLVSELSAAEAAGERVWIIGHMPLGLSDAFHDPSNYFDQIVNRYEATIAAMFFGHTHEDHFQISYSDYNARTAANARAVSYIMPSLTPTSGHPTFRVYTVDPETFGVLDATTYYADMSQPTYQTAGPAWSVYYSAKAAYGGLVDPPVAADDAAAELTPAFWHNVTAALAADPASFDAYYARKTRGWDVAACAGACAAAEVCALRAARAQDNCVVPTPGVHFSKRADEGTLAHHRDECGVSVARNSLSSLVVQREALEHLEGRLSEKRRMAV

SEQ ID NO: 241 - protein, 613 aa, Mariannaea pinicola
QEVTHDLAGIKRSLESRDWVEDLWDKFESDATCAGCESLVLVLKGLAAISDQAFIDVLQEICKISGAEDDDVCDGSIQLEGPVIASGLRSMAIGSRTSKEFCTTFLGLCAYPAVQQWSVPFSSSKSSKTRPSSSGKDPIKVVHYSDIHIDPLYVGGSNSNCTKPICCRSYTKADQPGNNKYPAGPNGDHNCDSPVSLEKSMYNAIKEIVPDAAFTIFTGDIVDHAVWNTSQSYNTEQITNAYGLMSDNLGTIYGTAGNHEAHPANAFQPNSVGNVSQWVYDLLSGLWSQWISTEAKADSEKLGAYSTKYPGGNLRIISLNTNMYYRENYWLYRKTMIQDPSNQISWLVNELEAAETAGERVYIIGHMPLGDSNSFHDQSNYLDQVINRYSATISAMFFGHTHDDQFQISYSNWSNRNFSNALVTSYIGPSLTPTAGMPAFRVYDVDPVTFGILDSTTYIADMTDSAFQTTGPVWKKYYSAKEVYGSLLSPAVTDSSAELTAAFWHNVTTLFEADNTAFEAFLSRKSRGWKSESCTGTCKANEICQLRAARSENNCYTPSLGISFNKRSLNPVEERDECGISVTRATVSAMGVRKDVLRLLKKRFIEKAGEVRG

SEQ ID NO: 242 - protein, 259 aa, Fictibacillus macauensis
HENEGGNKVRVIQYWSAEDPHHEDTNTHLWIVRHAMEIMANNKDVVKPGEVEQLKQWQSDLEQGIYDADHANPYYDNATFASHFYDPDTGKSYIPLAAHAKTTSVKYFKRAGEAYQKGDHKQAFYNLGLALHYIGDLNQPMHAANFTNLSYPQGFHSKYENYVDSFKEDYAVKDGEGYWHWKGTNPEDWLHGTAVAAKKDYPDIVNDTTKAWFVKAAVSNSYAAKWRAAVVPATGKRLTEAQRILAGYMQLWFDTYVNK

SEQ ID NO: 243 - DNA, 250 bp, Saccharomyces cerevisiae
acagaagacgggagacactagcacacaactttaccaggcaaggtatttgacgctagcatgtgtccaattcagtgtcatttatgattttttgtagtaggatataaatatatacagcgctccaaatagtgcggttgccccaaaaacaccacggaacctcatctgttctcgtactttgttgtgacaaagtagctcactgccttattatcacattttcattatgcaacgcttcggaaaatacgatgttgaaaat

SEQ ID NO: 244 - protein, 561 aa, Punctularia strigosozonata
SSKSVSAYISSESPIAHSKLLDNIGPDGAKAPGAFPGVVVASPSTDNPNYYYSWIRDSSLVFKTLIDDYVNGKNTSKSLRSLIDDFVTASSVFQQTPNPSGNVSTGGLGEPKFYVNETAFLDSWGRPQRDGPALRSTALITYANYLLDNDNTTWVKDTLWPIIELDVNYVSDFWNYTTFDLWEEVASSSFFTTAVQHRALRQASKLAKTLDKTDNIDSWNTQADNVLCFLQSYWNGSAIIANTGGGRSGIDANTVLASIHTFDSSAGCDATTFQPCSDKALSNLKVYVDAFRSIYEINSGIDPNAAVATGRYPEDVFYDGNPWYLATAAVAEQLYDALYVWNTTGSLEITDISLPFFQQFDSDVKTGTYSDDDTFDSLISSIQSFADGFLEIHAKYTPDDGALSEEFSKTDGSQTSAADLTWSYAAALTAFDARSRDAAVKWGAKGLQVPDGTCKTNEGGDDGLGVPVTFLVKDAETVEGQSVYITGSIATLKSWSPDDALLMSPSDYPTWTLTVNLSASESVQYKYIKKDTAGTVIWESDPNNSLLVPSGGSVTTDDTWR

SEQ ID NO: 245 - protein, 551 aa, Fibroporia radiculosa
QSTSVSAYIASESPVAKAGVLANIGTEGSLSSGAYSGVVIASPSTVNPDYLYTWVRDSSLTFQALIDQYVYGEDPTLRSLIDEFITAESILQQTTNPSGTVSTGGLGEPKFNINETAFTGPWGRPQRDGPALRSTAIITYATYLWNSGNTSYVSDSLWPIIELDLNYIATYWNFSTFDLWEEIDSSSFWTTAVQHRALRQGITFANLIGQTSPVSNYETQAGDILCFLQTYWNPTGNYMTANTGGGRSGKDSNTVLASVHTFDPDAGCDSTTFQPCSDKALSNLKVYVDSFRSLYAINDGIASDAAVATGRYPEDVYYGGNPWYLCTFAVAEQLYDALIVWSSQGYLEITDLSLAFFQQFDSDVGTGTYDSGSSTYSTLTSAIRTFADGFVLTNAKYTPTNGSLSEEYTSADGTPISAYDLTWSYASALTVFAAEAGTTYGSWGAAGLTVPSTCTSGVAVTFEVDYDTEYGENVYITGSVNALENWSATNALIMSAADYPTWSITVYLPPSTTIQYKYLTQYNGEVTWEDDPNNEITTPASGSMTQVDSWH

SEQ ID NO: 246 - protein, 552 aa, Wolfiporia cocos
QTTSVTSYIASESPIAKAGVLANIGADGSLSSGAYSGIVIASPSTVNPNYLYTWTRDSSLTFMELINQYIYGEDDTLRTLIDEFVSAEATLQQVTNPSGTVSTGGLGEPKFNINETAFTGPWGRPQRDGPALRATAIMAYATYLYENGNTSYVTDTLWPIIELDLGYVAEYWNESTFDLWEEIDSSSFFTTAVQHRALRAGVTFANLIGETSDVSNYQENADDLLCFLQSYWNPTGSYVTANTGGGRSGKDANTLLASIHTFDPDAGCNATTFQPCSDKALSNHKVYVDSFRSLYAINDDISSDAAVATGRYPEDVYYNGNPWYLCTLAAAEQLYDSLIVWKAQGYIEVTSLSLAFFQQFDASVSAGTYDSSSDTYTTLLDAVQTYADGFVLMVAQYTPANGSLSEQYAKADGSPTSAYDLTWSFAAALTAFAARDGKTYGSWGAADLSSTCSGSTDTVAVTFEVQYDTQYGENLYITGSVSQLEDWSADDALIMSSADYPTWSITVDLPPSTLIQYKYLTKYNGDVTWEDDPNNEITTPASGSYTQVDSWH

SEQ ID NO: 247 - protein, 591 aa, Talaromyces emersonii
ATGSLDSFLATETPIALQGVLNNIGPNGADVAGASAGIVVASPSRSDPNYFYSWTRDAALTAKYLVDAFNRGNKDLEQTIQQYISAQAKVQTISNPSGDLSTGGLGEPKFNVNETAFTGPWGRPQRDGPALRATALIAYANYLIDNGEASTADEIIWPIVQNDLSYITQYWNSSTFDLWEEVEGSSFFTTAVQHRALVEGNALATRLNHTCSNCVSQAPQVLCFLQSYWTGSYVLANFGGSGRSGKDVNSILGSIHTFDPAGGCDDSTFQPCSARALANHKVVTDSFRSIYAINSGIAEGSAVAVGRYPEDVYQGGNPWYLATAAAAEQLYDAIYQWKKIGSISITDVSLPFFQDIYPSAAVGTYNSGSTTFNDIISAVQTYGDGYLSIVEKYTPSDGSLTEQFSRTDGTPLSASALTWSYASLLTASARRQSVVPASWGESSASSVLAVCSATSATGPYSTATNTVWPSSGSGSSTTTSSAPCTTPTSVAVTFDEIVSTSYGETIYLAGSIPELGNWSTASAIPLRADAYTNSNPLWYVTVNLPPGTSFEYKFFKNQTDGTIVWEDDPNRSYTVPAYCGQTTAILDDSWQ

SEQ ID NO: 248 - protein, 578 aa, Rhizopus microsporus
VPTSAAVQVESYNYDGTTFSGRIFVKNIAYSKVVTVIYSDGSDNWNNNNNKVSAAYSEAISGSNYEYWTFSAKLSGIKQFYVKYEVSGSTYYDNNGTKNYQVQATSATSTTATATTTTATGTTTTSTGPTSTASVSFPTGNSTISSWIKNQEEISRFAMLRNINPPGSATGFIAASLSTAGPDYYYSWTRDSALTANVIAYEYNTTFTGNTTLLKYLKDYVTFSVKSQSVSTVCNCLGEPKFNADGSSFTGPWGRPQNDGPAERAVTFMLIADSYLTQTKDASYVTGTLKPAIFKDLDYVVSVWSNGCYDLWEEVNGVHFYTLMVMRKGLILGADFAARNGDSSRASTYKQTASTMESKISSFWSDSNNYVQVSQSVTAGVSKKGLDVSTLLAANIGSLPDGFFTPGSEKILATAVALENAFASLYPINSNLPSYLGNSIGRYPEDTYNGNGNSQGNPWFLAVNAYAELYYRAIKEWISNGKVTVSNISLPFFKKFDSSATSGKTYTAGTSDFNNLAQNIALGADRFLSTVKFHAYTNGSLSEEYDRSTGMSTGARDLTWSHASLITVAYAKAGSPAA

SEQ ID NO: 249 - protein, 579 aa, Rhizopus delemar
ASIPSSASVQLDSYNYDGSTFSGKIYVKNIAYSKKVTVIYADGSDNWNNNGNTIAASYSAPISGSNYEYWTFSASINGIKEFYIKYEVSGKTYYDNNNSANYQVSTSKPTTTTATATTTTAPSTSTTTPPSSSEPATFPTGNSTISSWIKKQEGISRFAMLRNINPPGSATGFIAASLSTAGPDYYYAWTRDAALTSNVIVYEYNTTLSGNKTILNVLKDYVTFSVKTQSTSTVCNCLGEPKFNPDGSGYTGAWGRPQNDGPAERATTFILFADSYLTQTKDASYVTGTLKPAIFKDLDYVVNVWSNGCFDLWEEVNGVHFYTLMVMRKGLLLGADFAKRNGDSTRASTYSSTASTIANKISSFWVSSNNWIQVSQSVTGGVSKKGLDVSTLLAANLGSVDDGFFTPGSEKILATAVAVEDSFASLYPINKNLPSYLGNSIGRYPEDTYNGNGNSQGNPWFLAVTGYAELYYRAIKEWIGNGGVTVSSISLPFFKKFDSSATSGKKYTVGTSDFNNLAQNIALAADRFLSTVQLHAHNNGSLAEEFDRTTGLSTGARDLTWSHASLITASYAKAGAPAA

SEQ ID NO: 250 - protein, 579 aa, Rhizopus oryzae
ASIPSSASVQLDSYNYDGSTFSGKIYVKNIAYSKKVTVVYADGSDNWNNNGNTIAASFSGPISGSNYEYWTFSASVKGIKEFYIKYEVSGKTYYDNNNSANYQVSTSKPTTTTAATTTTTAPSTSTTTRPSSSEPATFPTGNSTISSWIKKQEDISRFAMLRNINPPGSATGFIAASLSTAGPDYYYAWTRDAALTSNVIVYEYNTTLSGNKTILNVLKDYVTFSVKTQSTSTVCNCLGEPKFNPDGSGYTGAWGRPQNDGPAERATTFVLFADSYLTQTKDASYVTGTLKPAIFKDLDYVVNVWSNGCFDLWEEVNGVHFYTLMVMRKGLLLGADFAKRNGDSTRASTYSSTASTIANKISSFWVSSNNWVQVSQSVTGGVSKKGLDVSTLLAANLGSVDDGFFTPGSEKILATAVAVEDSFASLYPINKNLPSYLGNAIGRYPEDTYNGNGNSQGNPWFLAVTGYAELYYRAIKEWISNGGVTVSSISLPFFKKFDSSATSGKKYTVGTSDFNNLAQNIALAADRFLSTVQLHAPNNGSLAEEFDRTTGFSTGARDLTWSHASLITASYAKAGAPAA

SEQ ID NO: 251 - protein, 435 aa, Thermococcus gammatolerans
KYSELEQGGVIMQAFYWDVPAGGIWWDTIRQKIPEWYDAGISAIWIPPASKGMGGAYSMGYDPYDYFDLGEFYQKGTVETRFGSKEELVNMISTAHRYGIKVIADIVINHRAGGDLEWNPYVGDYTWTDFSQVASGKYKAHYMDFHPNNYSTSDEGTFGGFPDIDHLVPFNKYWLWASDESYAAYLRSIGVDAWRFDYVKGYGAWVVKDWLSWWGGWAVGEYWDTDVNALLNWAYDSGAKVFDFPLYYKMDEAFDNKNIPALVYAIQNGGTVVSRDPFKAVTFVANHDTNIIWNKYPAYAFILTYEGQPVIFYRDYEEWLNKDKLNNLIWIHEHLAGGSTKILYYDDDELIFMREGYGDRPGLITYINLGSGWAERWVNVGSKFAGYTIHEYTGNLGGWVDRYVYYNGWVKLTAPPHDPANGYYGYSVWSYAGVG

SEQ ID NO: 252 - protein, 432 aa, Thermococcus thioreducens
ETLENGGVIMQAFYWDVPMGGIWWDTIAQKIPDWASAGISAIWIPPASKGMSGGYSMGYDPYDYFDLGEYYQKGTVETRFGSKQELVNMINTAHAYGMKVIADIVINHRAGGDLEWNPFVNDYTWTDFSKVASGKYTANYLDFHPNELHAGDSGTFGGYPDICHDKSWDQYWLWASNESYAAYLRSIGIDAWRFDYVKGYAPWVVKDWLNWWGGWAVGEYWDTNVDALLNWAYASGAKVFDFPLYYKMDEAFDNNNIPALVDALRYGQTVVSRDPFKAVTFVANHDTDIIWNKYPAYAFILTYEGQPMIFYRDYEEWLNKDRLKNLIWIHDHLAGGSTDIVYYDSDELIFVRNGYGSKPGLITYINLGSSKAGRWVYVPKFAGSCIHEYTGNLGGWVDKWVDSSGWVYLEAPAHDPANGQYGYSVWSYCGVG

SEQ ID NO: 253 - protein, 440 aa, Thermococcus eurythermalis
QPAGAAKYLELEEGGVIMQAFYWDVPSGGIWWDTIRQKIPEWYDAGISAIWIPPASKGMGGAYSMGYDPYDFFDLGEYDQKGTVETRFGSKQELVNMINTAHAYGIKVIADIVINHRAGGDLEWNPFVNDYTWTDFSKVASGKYTANYLDFHPNEVKCCDEGTFGGFPDIAHEKSWDQYWLWASNESYAAYLRSIGVDAWRFDYVKGYGAWVVKDWLDWWGGWAVGEYWDTNVDALLNWAYSSDAKVFDFPLYYKMDAAFDNKNIPALVEALKNGGTVVSRDPFKAVTFVANHDTDIIWNKYPAYAFILTYEGQPTIFYRDYEEWLNKDRLKNLIWIHDHLAGGSTDIVYYDNDELIFVRNGYGDKPGLITYINLGSSKAGRWVYVPKFAGACIHEYTGNLGGWVDKWVDSSGWVYLEAPAHDPANGYYGYSVWSYCGVG

SEQ ID NO: 254 - protein, 432 aa, Thermococcus hydrothermalis
ETLENGGVIMQAFYWDVPGGGIWWDTIAQKIPDWASAGISAIWIPPASKGMSGGYSMGYDPYDFFDLGEYYQKGSVETRFGSKEELVNMINTAHAHNMKVIADIVINHRAGGDLEWNPFTNSYTWTDFSKVASGKYTANYLDFHPNELHAGDSGTFGGYPDICHDKSWDQHWLWASNESYAAYLRSIGIDAWRFDYVKGYAPWVVKNWLNRWGGWAVGEYWDTNVDALLSWAYDSGAKVFDFPLYYKMDEAFDNNNIPALVDALKNGGTVVSRDPFKAVTFVANHDTNIIWNKYPAYAFILTYEGQPAIFYRDYEEWLNKDRLRNLIWIHDHLAGGSTDIIYYDSDELIFVRNGYGDKPGLITYINLGSSKAGRWVYVPKFAGSCIHEYTGNLGGWIDKWVDSSGRVYLEAPAHDPANGQYGYSVWSYCGVG

SEQ ID NO: 255 - protein, 434 aa, Pyrococcus furiosus
KYLELEEGGVIMQAFYWDVPGGGIWWDHIRSKIPEWYEAGISAIWLPPPSKGMSGGYSMGYDPYDYFDLGEYYQKGTVETRFGSKEELVRLIQTAHAYGIKVIADVVINHRAGGDLEWNPFVGDYTWTDFSKVASGKYTANYLDFHPNELHCCDEGTFGGFPDICHHKEWDQYWLWKSNESYAAYLRSIGFDGWRFDYVKGYGAWVVRDWLNWWGGWAVGEYWDTNVDALLSWAYESGAKVFDFPLYYKMDEAFDNNNIPALVYALQNGQTVVSRDPFKAVTFVANHDTDIIWNKYPAYAFILTYEGQPVIFYRDFEEWLNKDKLINLIWIHDHLAGGSTTIVYYDNDELIFVRNGDSRRPGLITYINLSPNWVGRWVYVPKFAGACIHEYTGNLGGWVDKRVDSSGWVYLEAPPHDPANGYYGYSVWSYCGVG

SEQ ID NO: 256 - protein, 626 aa, Bacillus amyloliquefaciens
ETANKSNKVTASSVKNGTILHAWNWSFNTLTQNMKDIRDAGYAAIQTSPINQVKEGNQGDKSMRNWYWLYQPTSYQIGNRYLGTEQEFKDMCAAAEKYGVKVIVDAVINHTTSDYGAISDEIKRIPNWTHGNTQIKNWSDRWDVTQNSLLGLYDWNTQNTEVQAYLKRFLERALNDGADGFRYDAAKHIELPDDGNYGSQFWPNITNTSAEFQYGEILQDSASRDTAYANYMNVTASNYGHSIRSALKNRNLSVSNISHYASDVSADKLVTWVESHDTYANDDEESTWMSDDDIRLGWAVIGSRSGSTPLFFSRPEGGGNGVRFPGKSQIGDRGSALFKDQAITAVNTFHNVMAGQPEELSNPNGNNQIFMNQRGSKGVVLANAGSSSVTINTSAKLPDGRYDNRAGAGSFQVANGKLTGTINARSAAVLYPDDIGNAPHVFLENYQTGAVHSFNDQLTVTLRANAKTTKAVYQINNGQQTAFKDGDRLTIGKGDPIGTTYNIKLTGTNGEGAARTQEYKFVKKDPSQTNIIGYQNPDHWGQVNAYIYKHDGGRAIELTGSWPGKAMTKNADGMYTLTLPENADTANAKVIFNNGSAQVPGQNQPGFDYVQNGLYNNSGLNGYLPH

SEQ ID NO: 257 - protein, 250 aa, Saccharomyces cerevisiae
MPLTTKPLSLKINAALFDVDGTIIISQPAIAAFWRDFGKDKPYFDAEHVIHISHGWRTYDAIAKFAPDFADEEYVNKLEGEIPEKYGEHSIEVPGAVKLCNALNALPKEKWAVATSGTRDMAKKWFDILKIKRPEYFITANDVKQGKPHPEPYLKGRNGLGFPINEQDPSKSKVVVFEDAPAGIAAGKAAGCKIVGIATTFDLDFLKEKGCDIIVKNHESIRVGEYNAETDEVELIFDDYLYAKDDLLKW

SEQ ID NO: 258 - protein, 250 aa, Saccharomyces cerevisiae
MGLTTKPLSLKVNAALFDVDGTIIISQPAIAAFWRDFGKDKPYFDAEHVIQVSHGWRTFDAIAKFAPDFANEEYVNKLEAEIPVKYGEKSIEVPGAVKLCNALNALPKEKWAVATSGTRDMAQKWFEHLGIRRPKYFITANDVKQGKPHPEPYLKGRNGLGYPINEQDPSKSKVVVFEDAPAGIAAGKAAGCKIIGIATTFDLDFLKEKGCDIIVKNHESIRVGGYNAETDEVEFIFDDYLYAKDDLLKW

SEQ ID NO: 259 - protein, 391 aa, Saccharomyces cerevisiae
MSAAADRLNLTSGHLNAGRKRSSSSVSLKAAEKPFKVTVIGSGNWGTTIAKVVAENCKGYPEVFAPIVQMWVFEEEINGEKLTEIINTRHQNVKYLPGITLPDNLVANPDLIDSVKDVDIIVFNIPHQFLPRICSQLKGHVDSHVRAISCLKGFEVGAKGVQLLSSYITEELGIQCGALSGANIATEVAQEHWSETTVAYHIPKDFRGEGKDVDHKVLKALFHRPYFHVSVIEDVAGISICGALKNVVALGCGFVEGLGWGNNASAAIQRVGLGEIIRFGQMFFPESREETYYQESAGVADLITTCAGGRNVKVARLMATSGKDAWECEKELLNGQSAQGLITCKEVHEWLETCGSVEDFPLFEAVYQIVYNNYPMKNLPDMIEELDLHED

SEQ ID NO: 260 - protein, 440 aa, Saccharomyces cerevisiae
MLAVRRLTRYTFLKRTHPVLYTRRAYKILPSRSTFLRRSLLQTQLHSKMTAHTNIKQHKHCHEDHPIRRSDSAVSIVHLKRAPFKVTVIGSGNWGTTIAKVIAENTELHSHIFEPEVRMWVFDEKIGDENLTDIINTRHQNVKYLPNIDLPHNLVADPDLLHSIKGADILVFNIPHQFLPNIVKQLQGHVAPHVRAISCLKGFELGSKGVQLLSSYVTDELGIQCGALSGANLAPEVAKEHWSETTVAYQLPKDYQGDGKDVDHKILKLLFHRPYFHVNVIDDVAGISIAGALKNVVALACGFVEGMGWGNNASAAIQRLGLGEIIKFGRMFFPESKVETYYQESAGVADLITTCSGGRNVKVATYMAKTGKSALEAEKELLNGQSAQGIITCREVHEWLQTCELTQEFPLFEAVYQIVYNNVRMEDLPEMIEELDIDDE

SEQ ID NO: 261 - DNA, 700 bp, Saccharomyces cerevisiae
cacatagactgcgtcataaaaatacactacggaaaaaccataaagagcaaagcgatacctacttggaaggaaaaggagcacgcttgtaagggggatgggggctaagaagtcattcactttcttttcccttcgcggtccggacccgggacccctcctctccccgcacgatttcttcctttcatatcttccttttattcctatcccgttgaagcaaccgcactatgactaaatggtgctggacatctccatggctgtgacttgtgtgtatctcacagtggtaacggcaccgtggctcggaaacggttccttcgtgacaattctagaacaggggctacagtctcgataatagaataataagcgcatttttgctagcgccgccgcggcgcccgtttcccaatagggaggcgcagtttatcggcggagctctacttcttcctatttgggtaagcccctttctgttttcggccagtggttgctgcaggctgcgccggagaacatagtgataagggatgtaactttcgatgagagaattagcaagcggaaaaaaactatggctagctgggagttgtttttcaatcatataaaagggagaaattgttgctcactatgtgacagtttctgggacgtcttaacttttattgcagaggactatcaaatcatacagatattgtcaaaaaaaaaaaaagactaataataaaaa

SEQ ID NO: 262 - protein, 496 aa, Triticum aestivum
MAGTGVFADVLDGEVYKYYADGEWRASASGKTVAIVNPTTRQTQYRVQACTQEEVNKVMDAAKVAQKSWARTPLWKRAELLHKAAAILKEHKTPIAESLVKEIAKPAKDAVSEVVRSGDLVSYTAEEGVRILGEGKLLVSDSFPGNERNKYCLSSKVPLGVVLAIPPFNYPVNLAVSKIGPALIAGNSLVLKPPTQGAVAALHMVHCFHLAGFPKGLISCVTGKGSEIGDFLTMHPGVNCISFTGGDTGIAISKKAGMVPLQMELGGKDACIVLEDADLDLVAANIVKGGFSYSGQRCTAVKVVLIMEAVADTVVEKVNAKLAKLKVGPPEDDSDITPVVTESSANFIEGLVMDAKEKGATFCQEYRREGNLIWPLLLDHVRPDMRIAWEEPFGPVLPVIRINSVEEGIHHCNASNFGLQGCVFTRDINKAIMISDAMESGTVQINSAPARGPDHFPFQGLKDSGIGSQGITNSINMMTKVKSTVINLPSPSYTMG

SEQ ID NO: 263 - protein, 498 aa, Chlamydomonas reinhardtii
MSAQEFYAPILASTGVYKFYIDGQWKESVSGKSVAISNPSTRQTAYQVQACTQDEVNKMFESAKVAQKAWARTPLYKRAEVLHKVASLMRQYAQPIADCLVKEVAKPSKDSLTEVVRSADLIDYTAEEGVRYLGEGQLLNSDSFPGNARNKLCLVSKVPLGVVLAIPPFNYPVNLAVSKLAPALMAGNAVVLKPPTQGAVAGIHMVQCFHAAGLPAGLLSVATGRGAEIGDFLTTHPDVNCISFTGGDTGISIAKKAGMVPLQMELGGKDVCIVCEDADLDLAAKHIIKGGFSYSGQRCTAVKLVLVAAPVADRLVAAVAAGVAKLSVGRPEDDCDITPVVSESSANFIEGLAMDAKAKGATFVTGEWRREGNLIWPVLLDHVTADMRLAWEEPFGPVLPVMRVSSVEAAVEHCNKSKYGLQGCVFTRDINAAIRISDAMETGTVQVNSAPARGPDHFPFQGFRDSGIGSQGIRNSLAMMIKTKSTVINLDKESYTLG

SEQ ID NO: 264 - protein, 496 aa, Apium graveolens
MAGSGVYADIIEGDVFKYYSDGEWKKSSSGKSVAIINPTTRMTQFKVQACTQEEVNKAMETAKKVQKQWAKTPLWKRAELLHKAAAILKEHKAAIADCLVKEIAKPAKDSVTEVVRSGDLVSYCAEEGVRLLGEGKFLVSDSFPGNERTKYCLTSKIPLGVILAIPPFNYPVNLAVSKIGPALIAGNALVLKPPTQGAVACLHMVHCFHLAGFPKGLISCITGKGSEIGDFLTMHPGVNCISFTGGDTGIAISKKAGMVPLQMELGGKDACIVLEDADLDLVASNVIKGGFSYSGQRCTAIKVILVMQSVADTLVEKVNAKVAKLTVGPPEDNSDITPVVSESSANFIEGLVKDAKEKGATFCQEYKREGNLIWPLLLDNVKPDMRIAWEEPFGPILPVIRINSAEEGIHHCNASNFGLQGCVFTRDINKAMLISDAMESGTIQINSAPARGPDHFPFQGLKDSGIGSQGITNSINMMTKIKTTVINLPSPSYTMG

SEQ ID NO: 265 - protein, 496 aa, Cicer arietinum
MAATGVLAEILDGDVFKYYADGEWQKSSSGKSVSIINPTTRKPQYKVQACSQEEVNKVMDSAKAAQKLWAKTPLWKRAELLHKAAAILKEHKAEIAECLVKEVAKPAKDAVTEVVRSGDLVSYCAEEGVRILGEGKFLVSDSFPGNERTKYCLTSKIPLGVILAIPPFNYPVNLAVSKIAPALIAGNAIVLKPPTQGAVAALHMVHCFHLAGFPKGLISCVTGKGSEIGDFLTMHPAVNCISFTGGDTGIAVSKKAGMIPLQMELGGKDACIVLEDADLDLVAANIIKGGFSYSGQRCTAVKVVLVMESVADALVEKVNAKVAKLSVGPPENDCDITPVVSESSANFIEGLVLDAKQKGATFCQEYKREGNLIWPLLLDNVKPDMRIAWEEPFGPVLPVIRINSVEEGIHHCNASNFGLQGCVFTKDVNKAILISDAMETGTVQINSAPARGPDHFPFQGIKDSGIGSQGITNSINMMTKTKTTVINLPSPSYTMG

SEQ ID NO: 266 - protein, 479 aa, Bacillus pseudomycoides
MTTSNTYKFYLDGEWRESSSGQTIDIPSPYLHEVIGKVQAITREEVDEAIKSAQQAQKEWAEASLQDRAKYLYKWADELVNMQDEIADIVMKEVGKGYKDAKKEVVRTADLIRYTVDEALHMHGESMMGDSFPGGSKSKLAIIQRAPRGVVLAIAPFNYPVNLSAAKLAPALIMGNAVIFKPATQGVISGIKMVEALHKAGLPKGLVNVATGRGSVIGDYLVEHPGVNMVSFTGGTHTGAHLAKKAAMIPLVLELGGKDPGIVREDADLGEAAKHIVSGAFSYSGQRCTAIKRVLVHENVADELVSLLKDQVAELTVGSPEQDSTIVPLIDDKSADFVQGLVDDAVEKGATIVIGNKRERNLIYPTLIDNVTEDMKVAWEEPFGPILPIIRVSSDEQAIEIANKSDFGLQASVFTKDINKAFAIANKIDTGSVQINGRTERGPDHFPFIGVKGSGMGAQGIRKSLESMTREKVTVLNLV

SEQ ID NO: 267 - protein, 476 aa, Streptococcus equinus
MTKQYKNYVNGEWKLSKEEIKIYAPATGEELGSVPAMSQEEVDYVYASAKAAQKAWRALSYVERAEYLHKAADILMRDAEKIGAVLSKEIAKGYKSAVGEVIRTAEIINYAAEEGVRLEGEVLEGGSFDPASKKKIAIVRREPVGLVLAISPFNYPINLAGSKIAPALISGNVVALKPPTQGSISGLLLAEAFAEAGLPAGVFNTITGRGSVIGDYIVEHEAVNYINFTGSTPVGEHIGHLAGMRPIMLELGGKDSAIILEDADLDLAAKNIVAGAYGYSGQRCTAVKRVLVMDSIADKLVEKVSALVNNLTVGMPEDNADITPLIDTKAADYVEGLIKDAQEKGAKEVISFKREGNLISPVLFDNVTTDMRLAWEEPFGPVLPFIRVNSVEEAIEISNKSEYGLQASVFTNNFPLAFKIAEQLEVGTVHINNKTQRGTDNFPFLGAKKSGAGVQGVKYSIEAMTTVKSTVFDIAK

SEQ ID NO: 268 - protein, 497 aa, Glycine soja
MAAGTGLFAEILDGDVYKYYADGEWKKSASGKSVAIINPTTRKTQYKVQACSQEEVNKVMDLAKSAQKLWAKTPLWKRAELLHKAAAILKEHKAPIAECLVKEIAKPAKDAVTEVVRSGDLVSYTAEEGVRILGEGKFLVSDSFPGNERTKYCLTSKIPLGVILAIPPFNYPVNLAVSKIAPALIAGNSIVLKPPTQGAVSALHMVHCFHLAGFPKGLINCVTGKGSEIGDFLTMHPGVNCISFTGGDTGIAISKKAGMIPLQMELGGKDACIVLEDADLDLVAANIIKGGFSYSGQRCTAVKVVLVMESAADALVEKVKAKVAKLTVGPPEDDCDITPVVSESSANFIEGLVLDAKEKGATFCQEYKREGNLIWPLLLDNVRPDMRIAWEEPFGPVLPVIRINSVEEGIHHCNASNFGLQGCVFTKDVNKAIMISDAMETGTVQINSAPARGPDHFPFQGIKDSGIGSQGITNSINMMTKVKTTVINLPSPSYTMG

SEQ ID NO: 269 - protein, 475 aa, Streptococcus sp. DD12
MTKDYKNYVNGEWKGSESKIEIFEPANGELLGTVPAMSQADVDEVMAAAKAALPAWRALSYTERAAYLHKAADILERDAEKIGAVLSKEIAKGYKSAVGEVVRTAEIIHFAAEEGLRMEGEVLEGGAFDAGSKKKIAIVRREPVGLVLAISPFNYPVNLAGSKIAPALIAGDVVAFKPPTQGSISGLLLAEAFVEAGIPAGVLNTITGRGSVIGDYIVEHKAVDFINFTGSTPVGENIGRLAGMRPIMLELGGKDAAIVLEDADLDLTAKNIVAGAFDYSGQRCTAIKRVLVMDSVADELVEKVTALVANITVGMPEDSASVTPLIDTKAADFVQGLIDDAAEKGATAKTELKREGNLIYPTVFDHVTTDMRLAWEEPFGPVLPFIRVSSVEEAIKISNESEFGLQGAVFTQDYPRAFAIAEQLEVGTVHINNKTQRGTDNFPFLGVKSSGAGTQGVKYSIEAMTRVKSTVFDIK

SEQ ID NO: 270 - protein, 479 aa, Bacillus thuringiensis
MTTSNTYKFYLNGEWRESSSGETIEIPSPYLHEVIGQVQAITRGEVDEAIASAKEAQKSWAEASLQDRAKYLYKWADELVNMQDEIADIIMKEVGKGYKDAKKEVVRTADFIRYTIEEALHMHGESMMGDSFPGGTKSKLAIIQRAPLGVVLAIAPFNYPVNLSAAKLAPALIMGNAVIFKPATQGAISGIKMVEALHKAGLPKGLVNVATGRGSVIGDYLVEHEGINMVSFTGGTNTGKHLAKKASMIPLVLELGGKDPGIVREDADLQDAANHIVSGAFSYSGQRCTAIKRVLVHENVADELVSLVKEQVAKLSVGSPEQDSTIVPLIDDKSADFVQGLVDDAVEKGATIVIGNKRERNLIYPTLIDHVTEEMKVAWEEPFGPILPIIRVSSDEQAIEIANKSEFGLQASVFTKDINKAFAIANKIETGSVQINGRTERGPDHFPFIGVKGSGMGAQGIRKSLESMTREKVTVLNLV

SEQ ID NO: 271 - protein, 496 aa, Arabidopsis thaliana
MAGTGLFAEILDGEVYKYYADGEWKTSSSGKSVAIMNPATRKTQYKVQACTQEEVNAVMELAKSAQKSWAKTPLWKRAELLHKAAAILKDNKAPMAESLVKEIAKPAKDSVTEVVRSGDLISYCAEEGVRILGEGKFLLSDSFPGNDRTKYCLTSKIPLGVVLAIPPFNYPVNLAVSKIAPALIAGNSLVLKPPTQGAVSCLHMVHCFHLAGFPKGLISCITGKGSEIGDFLTMHPAVNCISFTGGDTGISISKKAGMIPLQMELGGKDACIVLDDADLDLVASNIIKGGFSYSGQRCTAVKVVLVMESVADELVEKVKAKVAKLTVGPPEENSDITAVVSESSANFIEGLVMDAKEKGATFCQEYKREGNLIWPLLLDNVRPDMRIAWEEPFGPVVPVLRINSVEEGINHCNASNFGLQGCVFTKDINKAILISDAMETGTVQINSAPARGPDHFPFQGLKDSGIGSQGVTNSINLMTKVKTTVINLPTPSYSMG

SEQ ID NO: 272 - protein, 486 aa, Bacillus litoralis
MLASVSAIKVTDYKFYVNGQWKESQSGQTIDIRSPYLYEVMGRVQVITKEEVDEAIGFARGAQIEWAETPLQERAKYLYKWADELVNMQDEIAEIIMTEVGKGLKDAKNEVVRTADFIRYTVEEALHMHGESMKGDSFPGGSKSKIAMIERVPLGIVLAISPFNYPVNLSAAKLAPALIAGNAVIFKPATQGAISGIKMIEALHKAGFPKGLVNLITGRGSVIGDYLVEHKGIDMISFTGGTNTGVHLAKKAAMIPLVLELGGKDPGIVREDADLVEAAKQIISGAFSYSGQRCTAIKRVLVHESIADELVGILKGEIEKLAVGSPEEGNTVVPLIDDQSADFVQGLIDDAIERGATVVIGHKRERNLIYPTLLDHVTEDMSVAWEEPFGPVLPVIRISSDEEAIDIANKSEFGLQASVFTKDINKAFAIANKIETGSVQINGRTERGPDHFPFIGVKGSGMGAQGIRRSIESMTREKVTVLNLSL

SEQ ID NO: 273 - protein, 476 aa, Streptococcus hyointestinalis
MTKAYKNYVNGEWKLSEESIEIFAPATGESLGTVPAMTTAEVDEVYAKAKAAQPAWRALSYVERAAYLHKVADILVRDAEKIGAVLSKEIAKGYKSAVSEVIRTAEIINYAAEEGLRMEGEVLEGGSFEAASKNKIAIVRREPVGLVLAISPFNYPINLAGSKIAPALISGNVVALKPPTQGSISGLLLAEAFAEAGLPAGVFNTITGRGSVIGDYIVEHEAVNFINFTGSTPIGERIGKLAGMRPIMLELGGKDSAIVLEDADLDLTAKNIIAGAFGYSGQRCTAVKRVLVMDSVADELVEKIRQQVLDLTIGNPEDDADITPLIDKNAADFVEGLINDASDKGAEALTEIKREGNLICPVLFDKVTTDMRLAWEEPFGPVLPIIRVKSVEEAIEISNKSEYGLQASVFTNNFPLAFKIASQLEVGTVHINNKTQRGTDNFPFLGAKKSGAGVQGVKYSIEAMTSVKSVVFDIAK

SEQ ID NO: 274 - protein, 498 aa, Zea mays
MALAGTGVFAEILDGEVYRYYADGEWRTSASGKSVAIVNPTTRKTQYRVQACTQEEVNKAMDAAKVAQKAWARTPLWKRADVLHKAAAILKEHKAPIAECLVKEIAKPAKDAVSEVVRSGDLVSYTAEEGVRILGEGKLVVSDSFPGNERNKYCLSSKIPLGVVLAIPPFNYPANLAGSKIGPALIAGNALVLKPPTQGAVAALHMVHCFHLAGFPKGLISCVTGKGSEIGDFLTMHPGVNCISFTGGDTGIAISKKAGMVPLQMELGGKDACIVLEDADLDLVSANIVKGGFSYSGQRCTAVKVVLIMESIADAVVQKVNAKLAKLKVGPPEDDSDITPVVTESSANFIEGLVMDAKEKGATFCQEYRREGNLIWPLLLDHVRPDMRIAWEEPFGPVLPVIRINSVEEGIHHCNASNFGLQGCIFTRDINKAILISDAMETGTVQINSAPARGPDHFSFQGLKDSGIGSQGITNSINMMTKVKSTVINLPSPSYTMG

SEQ ID NO: 275 - protein, 476 aa, Lactobacillus delbrueckii
MTEHYLNYVNGEWRDSADAIEIFEPATGKSLGTVPAMSHEDVDYVMNSAKKALPAWRALSYVERAAYLQKAADILYRDAEKIGSTLSKEIAKGLKSSIGEVTRTAEIVEYTAKVGVTLDGEVMEGGNFEAASKNKLAVVRREPVGLVLAISPFNYPVNLAGSKIAPALMGGNVVAFKPPTQGSISGLLLAKAFAEAGLPAGVFNTITGRGRVIGDYIVEHPAVNFINFTGSSAVGKNIGKLAGMRPIMLELGGKDAAIVLEDADLDLTAKNIVAGAFGYSGQRCTAVKRVLVMDSVADELVEKVTALAKDLTVGIPEEDADITPLIDTKSADYVQGLIEEAAEKGAKPLFDFKREGNLIYPMVMDQVTTDMRLAWEEPFGPVLPFIRVKSADEAVMIANESEYGLQSSVFSRNFEKAFAIAGKLEVGTVHINNKTQRGPDNFPFLGVKSSGAGVQGVKYSIQAMTRVKSVVFNIED

SEQ ID NO: 276 - protein, 475 aa, Streptococcus pluranimalium
MSKQYKNLVNGEWKLSDNDIKIYAPATGEELGSVPAMSQEDVDYVYETARAAQPAWRALSYVERAAYLHKAADILVRDAEKIGAVLSKEVAKGYKAAVSEVIRTAEIVRYAAEEGVRMEGEVLEGGSFDAASKKKIAIVRREPLGLVLAISPFNYPVNLAGSKIAPALISGNVVALKPPTQGSISGLLLAEVFAEAGLPAGVFSTITGRGSVIGDYIVEHEAVNFINFTGSTPVGERIGKMAGMRPIMLELGGKDSAIVLKDADLEKAAKNIVDGAFGYSGQRCTAVKRVLVQEEVADELVEIIREKVLKLTIGNPEDNADITPLIDTGAADFVEGLINDAVEKGAEVKTEIKREGNLICPVLFDKVTTDMKLAWEEPFGPVLPVIRVKSVEEAIEISNQSEYGLQASVFTNDFPLAFSIAEQLEVGTVHINNKTQRGTDNFPFLGAKKSGAGVQGVKYSIEAMTSVKSVVFDIK

SEQ ID NO: 277 - protein, 496 aa, Nicotiana plumbaginifolia
MAGNGVFVDIIEGDVFKYYSEGEWKKSASGKSVAIINPTTRKTQYKVQACTQEEVNKVMEVAKTAQKSWAKTPLWKRAELLHKAAAILKEHKAPIAECLVKEIAKPAKDAVTEVVRSGDLVSYTAEEGVRILGEGKFLVSDSFPGNERTKYCLTSKIPLGVILAIPPFNYPVNLAVSKIAPALIAGNSLVLKPPTQGAVACLHMVHCFHLAGFPKGLISCVTGKGSEIGDFLTMHPGVHCISFTGGDTGVAISKKAGMIPLQMELGGKDACIVLEDADLDLAAGSIVKGGFSYSGQRCTAVKVVLVMESVADALVEKVNAKVAKLTVGPPEDDCDITPVVSESSANFIEGLVMDAKQKNATFCQQYKREGNLIWPLLLDNVRPDMRIAWEEPFGPVLPVIRINSVEEGIHHCNASNFGLQGCVFTKDINKAILISDAMETGTVQINSAPARGPDHFPFQGIKDSGIGSQGITNSINMMTKVKTTVINLPTPSYTMG

SEQ ID NO: 278 - protein, 475 aa, Streptococcus macacae
MTKQYKDYVNGEWKLSKNDIKIYEPASGAELGLVPAMSTEEVDYVYASAHKALKEWRALSYVERAAYLHKVADILERDAEKIGAVLSKEVAKGYKSAVSEVIRTAEIINYAAEEGLRMEGEVLEGGSFEAASKKKIAVVRREPVGLVLAISPFNYPVNLAGSKIAPALIAGNVVAFKPPTQGSISGLLLAEAFAEAGLPAGVFNTITGRGSEIGDYIVEHPAVNFINFTGSTPIGERIGRMAGMRPIMLELGGKDSAIVLEDADLELTAKNIVAGAFGYSGQRCTAVKRVLVMEGVADKLVEKIREKVLALTIGNPENDADITPLIDTKAADFVEGLINDAKEKGADNLTEIKREGNLICPVLFDKVTTDMRLAWEEPFGPVLPIIRVKSVEEAIAISNQSEYGLQASIFTNDFPRAFGIAEQLEVGTVHLNNKTQRGTDNFPFLGAKKSGAGIQGVKYSIEAMTTVKSVVFDIK

SEQ ID NO: 279 - protein, 475 aa, Streptococcus mutans
MTKQYKNYVNGEWKLSENEIKIYEPASGAELGSVPAMSTEEVDYVYASAKKAQPAWRSLSYIERAAYLHKVADILMRDKEKIGAVLSKEVAKGYKSAVSEVVRTAEIINYAAEEGLRMEGEVLEGGSFEAASKKKIAVVRREPVGLVLAISPFNYPVNLAGSKIAPALIAGNVIAFKPPTQGSISGLLLAEAFAEAGLPAGVFNTITGRGSEIGDYIVEHQAVNFINFTGSTGIGERIGKMAGMRPIMLELGGKDSAIVLEDADLELTAKNIIAGAFGYSGQRCTAVKRVLVMESVADELVEKIREKVLALTIGNPEDDADITPLIDTKSADYVEGLINDANDKGAAALTEIKREGNLICPILFDKVTTDMRLAWEEPFGPVLPIIRVTSVEEAIEISNKSEYGLQASIFTNDFPRAFGIAEQLEVGTVHINNKTQRGTDNFPFLGAKKSGAGIQGVKYSIEAMTTVKSVVFDIK

SEQ ID NO: 280 - protein, 479 aa, Bacillus cereus; identical to SEQ ID NO: 270

SEQ ID NO: 281 - protein, 319 aa, Aspergillus niger
MASPTVKLNSGYDMPLVGFGLWKVNNDTCADQIYHAIKEGYRLFDGACDYGNEVEAGQGIARAIKDGLVKREELFIVSKLWNSFHDGDRVEPICRKQLADWGIDYFDLYIVHFPISLKYVDPAVRYPPGWKSEKDELEFGNATIQETWTAMESLVDKKLARSIGISNFSAQLVMDLLRYARIRPATLQIEHHPYLTQTRLVEYAQKEGLTVTAYSSFGPLSFLELSVQNAVDSPPLFEHQLVKSIAEKHGRTPAQVLLRWATQRGIAVIPKSNNPQRLKQNLDVTGWNLEEEEIKAISGLDRGLRFNDPLGYGLYAPIF

SEQ ID NO: 282 - protein, 319 aa, Aspergillus oryzae
MAPPTVKLNSGFDMPLVGFGLWKVNNETCADQVYEAIKAGYRLFDGACDYGNEVECGQGVARAIKEGIVKREDLFIVSKLWNSFHEGDRVEPVCRKQLADWGVEYFDLYIVHFPVALKYVDPAVRYPPGWNSESGKIEFSNASIQETWTAMESLVDKKLARSIGVSNFSAQLLMDLLRYARVRPATLQIEHHPYLTQPRLVEYAQKEGIAVTAYSSFGPLSFLELEVKNAVNTTPLFEHNTIKSLAEKYGKTPAQVLLRWATQRGIAVIPKSNNPTRLALNLEVTGWDLEKTELEAISSLDQGLRFNDPLGYGMYVPIF

SEQ ID NO: 283 - protein, 324 aa, Magnaporthe oryzae
MASPTMKLNNGLDMPQVGFGLWKVENSVCADVVYNAIKAGYRLFDGACDYGNEVECGQGVKRAIDEGLVKREELFIVSKLWNTFHDGERVEPIVKKQLADWGIEYFDLYLIHFPVALEYVDPSVRYPPGWHYDDAGTEIRPSKASIQETWTAMEKLVDAGLSKAIGVSNFQAQLLYDMLRYARIRPATLQIEHHPYLVQQRLIEACKTEGIVVTAYSSFGPASFKEFNMEHAEALTPLLEEPTIVKLAEKYGKDPGQVLLRWATQRGLAVIPKSSREKTMKSNFEAVGWDMEDSDIKTISALDKGIRFNQPANYFSTDKLWIFG

SEQ ID NO: 284 - protein, 317 aa, Meyerozyma guilliermondii
MSITLNSGYEMPSVGFGCWKVDKATCADTIYNAIKVGYRLFDGAEDYGNEKEVGEGINRALDEGLVARDELFVVSKLWNSFHDPKNVEKALDRTLSDLKVDYLDLFLIHFPIAFKFVPFEEKYPPGFYCGDGDKFIYEGVPIIDTWRALEKMVEKGKIRSIGISNFPGALIQDLLRGAKIKPAVLQIEHHPYLQQPRLIEYVQSQGIAITAYSSFGPQSFVELNHPRVKDVKPLFEHDVIKSVAEKANKTPAQVLLRWATQRGLAVIPKSNNPDRLLSNLKVNDFDLSQEDFKEISKLDIELRFNNPWDWDKIPTFV

SEQ ID NO: 285 - protein, 318 aa, Scheffersomyces stipitis
MPSIKLNSGYDMPAVGFGCWKVDVDTCSEQIYRAIKTGYRLFDGAEDYANEKLVGAGVKKAIDEGIVKREDLFLTSKLWNNYHHPDNVEKALNRTLSDLQVDYVDLFLIHFPVTFKFVPLEEKYPPGFYCGKGDNFDYEDVPILETWKALEKLVKAGKIRSIGVSNFPGALLLDLLRGATIKPSVLQVEHHPYLQQPRLIEFAQSRGIAVTAYSSFGPQSFVELNQGRALNTSPLFENETIKAIAAKHGKSPAQVLLRWSSQRGIAIIPKSNTVPRLLENKDVNSFDLDEQDFADIAKLDINLRFNDPWDWDKIPIFV

SEQ ID NO: 286 - protein, 362 aa, Meyerozyma caribbica
MTPNPSLVLNKVNDITFETLEAPTLLEPNEVMVEVKKTGICGSDIHYYSHGKIGDFVLTQPMVLGHESAGVVTAVGPKVTSLKVGDRVAIEPGVPSRFSDEYKSGHYQLCPHIVFAATPDPKHGSPSPPGTLCKYYKSPEDFLVKLPDCVSLELGAMVEPLSVGVHGCRQAKVTFGDVVVVFGGGPVGLLAAAAATKFGAAKVMVVDVIDDKLKMALEVGVATHTFNSKSGGADDLVKELGERPDVVIECTGAEVCINLGIESLKMGGRFSQVGNATRPVSFPIVAFSSRELTLYGSFRYGYNDYKTSVAILEHNYRNGRENAAIDFEKLITHRFKFEDAKKAYDYIRDGNVAVKVIIDGPE

SEQ ID NO: 287 - protein, 377 aa, Trichoderma reesei
MSPSAVDDAPKATGAAISVKPNIGVFTNPKHDLWISEAEPSADAVKSGADLKPGEVTIAVRSTGICGSDVHFWHAGCIGPMIVEGDHILGHESAGEVIAVHPTVSSLQIGDRVAIEPNIICNACEPCLTGRYNGCEKVEFLSTPPVPGPLRRYVNHPAVWCHKIGNMSWENGALLEPLSVALAGMQRAKVQLGDPVLVCGAGPIGLVSMLCAAAAGACPLVITDISESRLAFAKEICPRVTTHRIEIGKSAEETAKSIVSSFGGVEPAVTLECTGVESSIAAAIWASKFGGKVFVIGVGKNEISIPFMRASVREVDIQLQYRYSNTWPRAIRLIESGVIDLSKFVTHRFPLEDAVKAFETSADPKSGAIKVMIQSLD

SEQ ID NO: 288 - protein, 365 aa, Meyerozyma guilliermondii
MATSLVSHSMTFTNPSLQVTKNHTLELNETAVNRPQPGQVLLHVRATGICGSDIHFWKTGAIGELKVLGNCTLGHEAAGEVIEVGENVTNVAAGDRVAIEPGVPCGNCFLCSQGDYNLCEQVQFIGVYPYHGSMQRFLVHDARYVHKLPDNMSYEKGALVEPASVAYHAIERAQLRLGGGVLVAGAGPIGLFTLLLAKASGCTPLCITDISQDRLDFAKKLVPELKTYRINPKLTPQETGLEIKKQFGPTEYHAPHVSLECTGVESSINCCAYATRRSGTLMVVGVGKDEIKIPFMTLSLAEVDVKFINRYHHSWAPVIKLISEGIIKVEPLVTHRFPLEQAKAALECSQDPTSGSIKVMIVDTE

SEQ ID NO: 289 - protein, 359 aa, Candida arabinofermentans
MVSLPKPTNPSLVVNEKHSIFMQDAPIVEPGANKVLVHVRACGICGSDVHFWKMGQIGELVVEGNCILGHEACGDVISVGENVTKVKVGDRVAVEPQLPCGKCYLCMDGNYNLCKEVEFSSVYPHNGLMQRYKVHDERFVHKIPDKMTYAQGALVEPVSVAYHGVERSQLTLGKAAMVAGAGPIGLCTLALAKASGATPLLITDISSKRLEFAKKLIPEVTTYQIDTKKSNWENAQEIRKLFGPTEYEQPPCVLECTGVESSIITGGFVTRRGGTLTVLGVGRGDINNFPFMHLSLAEIDVKFINRYHDSWPACINLIANKVINVDSLVTHRFPLEQAVQAMEVSSDPSNGNIKVMIED

SEQ ID NO: 290 - protein, 362 aa, Candida carpophila
MTPNPSLVLNKVNDITFETLEAPTLLEPNEVMVEVKKTGICGSDIHYYTHGKIGDFVLTQPMVLGHESAGVVTAVGSAVKSLKVGDRVAIEPGIPSRFSEEYKSGRYQLCPHIVFAATPDPGHGSPSPPGTLCKYYKSPEDFLVKLPDCVSLELGAMVEPLSVGVHGCKQAKVTFGDVVVVFGGGPVGLLAAAAATKFGAAKVMVVDVIDDKLKMALEVGVATHTFNSKLGGADELIKALGERPDVVVECTGAEVCINLGIESLKMGGRFSQVGNSIRPVNFPIVAFSSRELTLYGSFRYGYNDYKTSVAILEHNYRNGRENAAIDFEKLITHRFKFEDAKKAYDYIRDGNVAVKVIIDGPE

SEQ ID NO: 291 - protein, 388 aa, Talaromyces emersonii
MAAGISLTKPNIGVYTNPNHDLWVADAKPTLEEVKSGSDLKPGQVTVEIRSTGICGSDVHFWHAGCIGPMIVTGDHILGHESAGVVIAVAPDVKTLKPGDRVAIEPNIICNKCEPCLTGRYNGCEAVEFLSTPPVDGLLRRYVNHPAIWCHKIGDMSFEDGALLEPLSVALAGMDRAGVRLGDPVLVAGAGPIGLVTLLCVRAAGATPIVITDIDEGRLRFAKELVPEVRTYRVQTGLSAEENAAGILDALNDGNGSAPDAIRPRVAMECTGVESSVASAIWSVKFGGKVFVIGVGKNEMKVPFMRLSTWEIDLQYQYRYCNTWPKAIRLVKNGVINLKKLVTHRFPLEDAVKAFETAANPKTGAIKVQIMSSEEDIKAASGVNGASN

SEQ ID NO: 292 - protein, 382 aa, Aspergillus oryzae
MATATVLEKANIGVYTNTNHDLWVAESKPTLEEVKSGESLKPGEVTVQVRSTGICGSDVHFWHAGCIGPMIVTGDHILGHESAGEVIAVASDVTHLKPGDRVAVEPNIPCHACEPCLTGRYNGCEKVLFLSTPPVDGLLRRYVNHPAVWCHKIGDMSYEDGALLEPLSVSLAAIERSGLRLGDPVLVTGAGPIGLITLLSARAAGATPIVITDIDEGRLAFAKSLVPDVITYKVQTNLSAEDNAAGIIDAFNDGQGSAPDALKPKLALECTGVESSVASAIWSVKFGGKVFVIGVGKNEMKIPFMRLSTQEIDLQYQYRYCNTWPRAIRLVRNGVISLKKLVTHRFLLEDALKAFETAADPKTGAIKVQIMSNEEDVKGASA

SEQ ID NO: 293 - protein, 363 aa, Neurospora crassa
MASSASKTNIGVFTNPQHDLWISEASPSLESVQKGEELKEGEVTVAVRSTGICGSDVHFWKHGCIGPMIVECDHVLGHESAGEVIAVHPSVKSIKVGDRVAIEPQVICNACEPCLTGRYNGCERVDFLSTPPVPGLLRRYVNHPAVWCHKIGNMSYENGAMLEPLSVALAGLQRAGVRLGDPVLICGAGPIGLITMLCAKAAGACPLVITDIDEGRLKFAKEICPEVVTHKVERLSAEESAKKIVESFGGIEPAVALECTGVESSIAAAIWAVKFGGKVFVIGVGKNEIQIPFMRASVREVDLQFQYRYCNTWPRAIRLVENGLVDLTRLVTHRFPLEDALKAFETASDPKTGAIKVQIQSLE

SEQ ID NO: 294 - protein, 377 aa, Trichoderma reesei
MSPSAVDDAPKATGAAISVKPNIGVFTNPKHDLWISEAEPSADAVKSGADLKPGEVTIAVRSTGICGSDVHFWHAGCIGPMIVEGDHILGHESAGEVIAVHPTVSSLQIGDRVAIEPNIICNACEPCLTGRYNGCEKVEFLSTPPVPGLLRRYVNHPAVWCHKIGNMSWENGALLEPLSVALAGMQRAKVQLGDPVLVCGAGPIGLVSMLCAAAAGACPLVITDISESRLAFAKEICPRVTTHRIEIGKSAEETAKSIVSSFGGVEPAVTLECTGVESSIAAAIWASKFGGKVFVIGVGKNEISIPFMRASVREVDIQLQYRYSNTWPRAIRLIESGVIDLSKFVTHRFPLEDAVKAFETSADPKSGAIKVMIQSLD

SEQ ID NO: 295 - protein, 386 aa, Aspergillus niger
MATATVLEKANIGVFTNTKHDLWVADAKPTLEEVKNGQGLQPGEVTIEVRSTGICGSDVHFWHAGCIGPMIVTGDHILGHESAGQVVAVAPDVTSLKPGDRVAVEPNIICNACEPCLTGRYNGCENVQFLSTPPVDGLLRRYVNHPAIWCHKIGDMSYEDGALLEPLSVSLAGIERSGLRLGDPCLVTGAGPIGLITLLSARAAGASPIVITDIDEGRLEFAKSLVPDVRTYKVQIGLSAEQNAEGIINVFNDGQGSGPGALRPRIAMECTGVESSVASAIWSVKFGGKVFVIGVGKNEMTVPFMRLSTWEIDLQYQYRYCNTWPRAIRLVRNGVIDLKKLVTHRFLLEDAIKAFETAANPKTGAIKVQIMSSEDDVKAASAGQKI

SEQ ID NO: 296 - protein, 385 aa, Penicillium rubens
MASATVTKTNIGVYTNPKHDLWIADSSPTAEDINAGKGLKAGEVTIEVRSTGICGSDVHFWHAGCIGPMIVTGDHVLGHESAGQVLAVAPDVTHLKVGDRVAVEPNVICNACEPCLTGRYNGCVNVAFLSTPPVDGLLRRYVNHPAVWCHKIGDMSYEDGAMLEPLSVTLAAIERSGLRLGDPLLITGAGPIGLISLLSARAAGACPIVITDIDEGRLAFAKSLVPEVRTYKVEIGKSAEECADGIINALNDGQGSGPDALRPKLALECTGVESSVNSAIWSVKFGGKVFVIGVGKNEMTIPFMRLSTQEIDLQYQYRYCNTWPRAIRLIQNGVIDLSKLVTHRYSLENALQAFETASNPKTGAIKVQIMSSEEDVKAATAGQKY

SEQ ID NO: 297 - protein, 298 aa, Aspergillus brasiliensis
MSRPLEGKLAIVTGGSRGIGEAIAHNLASKGCSLLLNYTSDSSRARTESLCTTLTTTHNITCIPVQADLSDPTPAITTILTAAKTHFTSPTTNTLTIDILINNAGVSKDRFLNDPSSGPIDPAYFNWHYTINVLAPLLLTQACAEYLPRTPAHSGRIINISSISSSLGFTGQSVYGGTKAALEAMTRTWARELADVATVNAVNPGPVVGDMYFATGEEFWKQMQGFQDNAPLSKLQDGEVEENGLTEEQGRLIREKMGGRRPAFTKEIAGVVGMLCTEDGAWCTGSVVCANGGLKFTT

SEQ ID NO: 298 - protein, 274 aa, Candida sorboxylosa
MAAVVPTFKLTNEVTILTGACGGLSHALLHSLLAYEAPVALFDRNMEALEATRQDMIKYCISELGIKAEDVPRMECYVCNIADAAEVEQACEKVYQDFGSYPLHLVNTAGYCENFPAEEYPASNAENLVKVNLLGSLYICQSFAKPLIKNNIKGGSIVMIGSMSGVIVNDPQPQIAYNMSKAGVIHMVKSLGVEWAKYGIRVNALSPGYIATPLTKNVINGNVDMYNRWISMIPMKRMSDPSEFSGTVLYLLSNSASSYTTGENIVVDGGYQCL

SEQ ID NO: 299 - protein, 271 aa, Brettanomyces anomalus
MANFPDFRLDGEVTVVTGACGGLSGAVIPGLLAYGSDIALLDMDEKNIQQSIEDFKKQAKEKLKLEKVPEMKGYVCDVSDAANVNQVFEKIHAEFGKYPLHLLNTAGYCENFPAEKYPAKNAARLISVNLLGSLYVAQAWARPLIENKVQGASAVMIGSMSGNIVNDPQPQICYNMSKAGVIHMVKTLAAEWSKYNIRINTLSPGYISGPLTAKVIQADPKMYDRWMSMVPMHRMAEPQEFAGTILYLLSNQASSYTTGANIIADGGYACW

SEQ ID NO: 300 - protein, 306 aa, Talaromyces leycettanus
MWSPTRASAATFARPLEGKFGIVTGGSRGIGEAIARNLAAKGCSLLLNFTSESSRARTEELCTSLASKHSIRCFSVQADLANAEEAVDKILAAAKQHFTSSEGKFRIDVLINNAGVSQDRFLNDPAKGPITPEYFNWHYNINVLAPLLLTQACAPFLPTDRSGRIVNISSVSSSIGFTGQSVYGGTKAALEAMTRTWARELADKATVNAVNPGPVIGDMYFKTGEDFWKQMQGFQDATPLSKMDEDDAGLQDLSEEQIRLIKEKMGGRRPAFTSEIAGVVGMLCTQDGAWCTGSVVCANGGMRMTV

SEQ ID NO: 301 - protein, 274 aa, Kuraishia capsulata
MDVVPSFRQDGKLTIITGGSGGLANPIAKALLANGSEIALIDMNLQRTQDAALEIADWGTEYFKQTGFSGVVPKVSAWVCDISDFSSVESCFAEIAESHGKLATNLVNTAGYCENFPAEDYPAANAEKLIKVNLLGSLYVAQALAKPLIKQGLTGSLVLIGSMSGSVVNNPQPQVAYNASKAGVIHMVKSLAAEWAKYNIRVNTLSPGYILTPLTKNVISGDVAMKNSWESQVPMKRLAEPKEFVGSILYLLSESGSSYTTGHDLIVDGGYTLW

SEQ ID NO: 302 - protein, 298 aa, Aspergillus aculeatus
MSGILAGKLAIITGGSRGIGEAIAHNLARKGCSLLLNYTSDSSRARTESLCTQLAREHSIRCVPVQADLSDPAPAIERILSVAKAEFSSSTQQQLTIDILINNAGVSKDRFLNDATKGAIDADYFNWHYTINVLAPLLLTQAIAPYLPRSPPRSGRIVNISSISSALGFTGQSVYGGTKAALEAMTRTWARELADVATVNAVNPGPVIGDMYFATGEAFWQQMQGFQDNTPGSKMVEDDPLVGQLTEEQKQLIKEKMGGRRPGFTAEVAGVVGMLCSEDAGWCTGSVVCANGGLRFTT

SEQ ID NO: 303 - protein, 274 aa, Pichia membranifaciens
MATGVPNFKLTNELTIITGACGGLSQALLHTLLAYEAPVALFDRNMEALKKTKEELVLFCTAELGVKADAVPQMECFACNIADAQEVEAACEAVYTAFGTYPLHLVNTAGYCENYPAEEYPAANAENLVKVNLLGSLYIAQSFARPLIKHGIRGGSIVMIGSMSGVIVNDPQPQIAYNMAKAGVIHMVKSLAAEWAKYNIRVNTLSPGYIATPLTKNVINGNADLYNRWMSMVPMKRMSDPSEFSGTVLYLLSNSASSYTTGENIVVDGGYQCW

SEQ ID NO: 304 - protein, 298 aa, Aspergillus niger
MSRSLEGKFAIITGGSRGIGEAIAHNLASKGCSLLLNYTSDSSRTRTESLCNTLSTTHKITCIPVQADLSDPAPAVNTIISAAKTHFTSPTTNTLTIDILINNAGVSKDRFLNDPSSGPIDPAYFNWHYTINVLAPLLLTQACAEYLPRKPAHSGRIINISSISSSLGFTGQSVYGGTKAALEAMTRTWARELADVATVNAVNPGPVVGDMYFATGEEFWKQMQGFQDNTPLSKLVDGEEAVEELLSEEQKRLIREKMGGRRPAFTREIAGVVGMLCTEDGAWCTGSVVCANGGLKFT

SEQ ID NO: 305 - protein, 266 aa, Trichoderma reesei LXR
MPQPVPTANRLLDLFSLKGKVVVVTGASGPRGMGIEAARGCAEMGADLAITYSSRKEGAEKNAEELTKEYGVKVKVYKVNQSDYNDVERFVNQVVSDFGKIDAFIANAGATANSGVVDGSASDWDHVIQVDLSGTAYCAKAVGAHFKKQGHGSLVITASMSGHVANYPQEQTSYNVAKAGCIHLARSLANEWRDFARVNSISPGYIDTGLSDFIDEKTQELWRSMIPMGRNGDAKELKGAYVYLVSDASSYTTGADIVIDGGYTTR

SEQ ID NO: 306 - protein, 272 aa, Ambrosiozyma monospora
MTDYIPTFRFDGHLTIVTGACGGLAEALIKGLLAYGSDIALLDIDQEKTAAKQAEYHKYATEELKLKEVPKMGSYACDISDSDTVHKVFAQVAKDFGKLPLHLVNTAGYCENFPCEDYPAKNAEKMVKVNLLGSLYVSQAFAKPLIKEGIKGASVVLIGSMSGAIVNDPQNQVVYNMSKAGVIHLAKTLACEWAKYNIRVNSLNPGYIYGPLTKNVINGNEELYNRWISGIPQQRMSEPKEYIGAVLYLLSESAASYTTGASLLVDGGFTSW

SEQ ID NO: 307 - protein, 274 aa, Candida arabinofermentans
MASIIPTFRLDGGLTVVTGASGGLADAIIKGLLAYGSEIALLDMNIERVKETQAELTKFCIEELKLKEDSIPKMAAFACDISDAEHVESVFHDIYVEFGKYPLYLVNTAGYCENFAAEDYPAKRAEKLVQVNLLGSLYVCQSFARPLIKNGIKGGSAVMIGSMSGEIVNDPQPQIAYNMAKAGVIHMVRTLGAEWSKYNIRVNTLSPGYILTPLTKNVINGNNEMYQRWLSMIPMNRMSEPKEFIGTVLYLLSNSASSYTTGTNVTVDGGYSLW

SEQ ID NO: 308 - protein, 274 aa, Ogataea parapolymorpha
MADIVPTFRLDNELTVVTGASGGLSNAIIKGLLAYGSELALLDMNLERTKETQAELFKFCVEELKIKEDLVPKMHSYVCDISDAEHVNEVFAQIYADFGKYPLHLVNTAGYCENFPAEQYPAKNAEKLLKVNLLGALYVAQAFAKPLIDNNIKGGSIVMIGSMSGEIVNDPQPQVAYNMSKAGVIHMVKSLAAEWAKYSIRVNTLSPGYILTPLTKNVINGNNEMYQRWLSLTPMGRLSEAKEFTGTVLYLLSNSASSYTTGANITVDGGFTCW

SEQ ID NO: 309 - protein, 364 aa, Scheffersomyces stipitis
MTANPSLVLNKIDDISFESYDAPEITEPTDVLVEVKKTGICGSDIHYYAHGKIGNFVLTKPMVLGHESSGIVTKVGAGVTSLKVGDKVAIEPGIPSRLSDAYKSGHYNLCPHMCFAATPNSTEGEPNPPGTLCKYFKSPEDFLVKLPEHVSLEMGALVEPLSVGVHASKLASVRFGDYVAVFGAGPVGLLAAAVAKTFGAKGVIVIDIFDNKLQMAKDIGAATHTFNSKTGGDAAALVKAFDGHEPTVVLECTGAEPCINQGVAILAQGGRFVQVGNAPGPVKFPITEFATKELTLFGSFRYGFNDYKTSVDIMDTNYKNGKENAPIDFEQLITHRFKFDDAIKAYDLVRAGSGAVKCIIDGPE

SEQ ID NO: 310 - protein, 623 aa, Scheffersomyces stipitis
MTTTPFDAPDKLFLGFDLSTQQLKIIVTDENLAALKTYNVEFDSINSSVQKGVIAINDEISKGAIISPVYMWLDALDHVFEDMKKDGFPFNKVVGISGSCQQHGSVYWSRTAEKVLSELDAESSLSSQMRSAFTFKHAPNWQDHSTGKELEEFERVIGADALADISGSRAHYRFTGLQIRKLSTRFKPEKYNRTARISLVSSFVASVLLGRITSIEEADACGMNLYDIEKREFNEELLAIAAGVHPELDGVEQDGEIYRAGINELKRKLGPVKPITYESEGDIASYFVTRYGFNPDCKIYSFTGDNLATIISLPLAPNDALISLGTSTTVLIITKNYAPSSQYHLFKHPTMPDHYMGMICYCNGSLAREKVRDEVNEKFNVEDKKSWDKFNEILDKSTDFNNKLGIYFPLGEIVPNAAAQIKRSVLNSKNEIVDVELGDKNWQPEDDVSSIVESQTLSCRLRTGPMLSKSGDSSASSSASPQPEGDGTDLHKVYQDLVKKFGDLYTDGKKQTFESLTARPNRCYYVGGASNNGSIIRKMGSILAPVNGNYKVDIPNACALGGAYKASWSYECEAKKEWIGYDQYINRLFEVSDEMNSFEVKDKWLEYANGVGMLAKMESELKH

SEQ ID NO: 311 - protein, 570 aa, Aspergillus niger
MQGPLYIGFDLSTQQLKGLVVNSDLKVVYVSKFDFDADSRGFPIKKGVLTNEAEHEVFAPVALWLQALDGVLEGLRKQGMDFSQIKGISGAGQQHGSVYWGENAEKLLKELDASKTLEEQLDGAFSHPFSPNWQDSSTQKECDEFDAALGGQSELAFATGSKAHHRFTGPQIMRFQRKYPDVYKKTSRISLVSSFIASLFLGHIAPMDISDVCGMNLWNIKKGAYDEKLLQLCAGSSGVDDLKRKLGDVPEDGGIHLGPIDRYYVERYGFSPDCTIIPATGDNPATILALPLRASDAMVSLGTSTTFLMSTPSYKPDPATHFFNHPTTAGLYMFMLCYKNGGLARELVRDAVNEKLGEKPSTSWANFDKVTLETPPMGQKADSDPMKLGLFFPRPEIVPNLRSGQWRFDYNPKDGSLQPSNGGWDEPFDEARAIVESQMLSLRLRSRGLTQSPGEGIPAQPRRVYLVGGGSKNKAIAKVAGEILGGSEGVYKLEIGDNACALGAAYKAVWAMERAEGQTFEDLIGKRWHEEEFIEKIADGYQPGVFERYGQAVEGFEKMELEVLRQEGKH

SEQ ID NO: 312 - protein, 598 aa, Schizosaccharomyces pombe
MSVPLRFSTPSSSPSASDNESVHDDGPTTELDTFNTTDVPRRVNTTKARQMRPKNTLKVAFSSPNLKGLDNTADSDSQPWLGGYLAGRLEDISGQSRRNYVDPYYEELNAGRRPNKPVWSLNGPLPHVLGNSVVEKISQKNQEARSRANSRVNSRANSRANSSVSLAGMDGSPNWKRKMKSAVFGSRVKLNDEEAQLPRNKSSVSIAEQAASRPKVSFSLQSSRQPSIAEEQPQTQRKSSAITVEHAENAEPETPRNNVSFSRKPSIAEQDSSQDITMPPNEIIAEESLDSGSDTETLYLNYWCKIRHFFREGFAEFLGTLVLVVFGVGSNLQATVTNGAGGSFESLSFAWGFGCMLGVYIAGGISGGHVNPAVTISLAIFRKFPWYKVPIYIFFQIWGAFFGGALAYGYHWSSITEFEGGKDIRTPATGGCLYTNPKPYVTWRNAFFDEFIGTAVLVGCLFAILDDTNSPPTQGMTAFIVGLLIAAIGMALGYQTSFTLNPARDLGPRMFAWWIGYGPHSFHLYHWWWTWGAWGGTIGGGIAGGLIYDLVIFTGPESPLNYPDNGFIDKKVHQITAKFEKEEEVENLEKTDSPIENN

SEQ ID NO: 313 - protein, 571 aa, Millerozyma farinosa
MGFELWGRTNTGGLRGRPLRVAITAVATTGFSLFGYDQGLMSGIITGTEFNEEFPPTWSKPHYNASEKRHATVVQGAVTACYEIGCFFGALFALVRGDRIGRRPLVIVGAVLIIIGTVISTAAFGEHWGLGQFVIGRVITGIGNGMNTATIPVWQSEISRPENRGKLVNLEGSVIAIGTFVAYWIDFGLSYVNSSVQWRFPVAFQIVFAAGLLGGILFMPESPRWLLAHGKKEQAHIVLGALNDLDPNDDHVLAESTVITDAINRFSRSQLGFKELMSGGKNQHFARMVIGSSTQFFQQFTGCNAAIYYSTVLFEETIFVGDRRLSLVMGGVFASVYALATIPSFFLVDKLGRRNLFLIGATGQALSFTITFACLINPTKQNAKGAAVGIFLFITFFAFTILPLPWIYPPEINPLRTRTVASAVSTCTNWLTNFAVVMFTPIFINDAQWGCYLFFACLNYAFIPVIFWFYPETAGRSLEEIDIIFAKAYTDGRPPWRVAATMPHLSLKEQEEQGMQLGLYDNEAEKQKFEQTENLMSSSSSAKLPEEGSNVNENENENTNEKDQTPKPTDV

SEQ ID NO: 314 - protein, 293 aa, Paramormyrops kingsleyae
METERKRTMKECCVVRNRIFREFLAEFLGTFILILFGCGSVAQTVLSRGALGEPLTIHIGFTLGVMMAVYVAGGVSGAHINPAVSLAMVVLGRLKLVKFPVYVMAQFLGAFVGAAAVFCLYYDAFMDFTSGILSVTGINATAHIFASYPSRHLSIINGFIDQVFGTGILVLCILAIIDGKNIGAPRGMEPLVIGLIILGIGVSMGLNCGYPLNPARDLGPRVFTAVAGWGMEVFSTADYWWWIPVAGPLVGGVVGGAIYFLFIELHHESEPVTEQEEEESSSIQDKYEMIAVS

SEQ ID NO: 315 - protein, 292 aa, Xenopus tropicalis
MGRQKDFVNKCNQMLRLRNKLLRQALSECLGTLILVMFGCGSVAQVVLSKGSHGQFLTVNLAFGFAVMLGILISGQVSGGHLNPAVTFALCILAREPWVKFPVYSIAQTLGAFLGAGIIYGLYYDAIWYFANDQLYVTGENGTAGIFTTFPSDHLTLMNGFFDQFIGTAALVVCVLAIVDPNNNPIPRGLEAFTVGFVVLVIGTSMGFNSGYAVNPARDFGPRLFTSLAGWGTEVFWAGNQWWWVPIVSPLLGAFAGVLVYQLMIGCHIEPVPQSTEQENIKLADVKPKDRI

SEQ ID NO: 316 - protein, 258 aa, Plasmodium falciparum
MHMLFYKSYVREFIGEFLGTFVLMFLGEGATANFHTTGLSGDWYKLCLGWGLAVFFGILVSAKLSGAHLNLAVSIGLSSINKFDLKKIPVYFFAQLLGAFVGTSTVYGLYHGFISNSKIPQFAWETSRNPSISLTGAFFNELILTGILLLVILVVVDENICGKFHILKLSSVVGLIILCIGITFGGNTGFALNPSRDLGSRFLSLIAYGKDTFTKDNFYFWVPLVAPCVGSVVFCQFYDKVICPLVDLANNEKDGVDL

SEQ ID NO: 317 - protein, 571 aa, Millerozyma farinosa; identical to SEQ ID NO: 313

SEQ ID NO: 318 - protein, 297 aa, Xenopus laevis
MVSHLAFLKNMKLKLRTQNLYVRCGLAEFLGTLILILFGCGSVAQMELSGFAKAQFLSVNMAFGFAVTAGAYVCAGVSGAHLNPAVSLAMFILKKLSWKLFLIYCLAQFLGAFIGAALVFSLYYDALHVYSNGNWTVYGPQSTAGIFASYPSEHLSVINGFTDQVIATAALLICILAILDEANNAAPRGLQPFLIGIMVLLVGLAMGFNCGYPINPARDLAPRFFTAIAGWGSEVFSAGGHWWWVPVLGPLVGGVVGAVIYEVFIEFHHPSPNQKQESEEPTEGINRPHYELVQSSA

SEQ ID NO: 319 - protein, 540 aa, Torulaspora delbrueckii
MTGFSLFGYDQGLMASLITGTQFNYEFPATKSKSDNDTHASTVQGAVTSCYEIGCFFGSLFVMFYGEKIGRKPLIVIGSVITIVGAVISTTAFRDYWALGQFVVGRVITGVGTGLNTSTIPVWQSEMSDPSIRGILVNLEGSTIAIGTMLAYWIDFGFSFIDSSVQWRFPVSMQILFALILCFMIVNLPESPRWLISQSRTEEARYLLGQLDDVDPNDDRIVAEVAMIHDAVNRSKQEKNSMSVLFSGGKSQNMQRALVAASTQFFQQFTGCNAAIYYSTVLFHETIQLSPRLSMILGAVFSTVYALSTIPSFFLIERLGRRKLFLLGATGQAISFTITFACLVRQTEENAKGAAVGLFLFIVFFGCSMLSLPWIYPPEIASMKVRASTNAFSTCTNWLCNFAVVMFTPIFINKSGWGCYLFFACINYLYIPVIFFFYPETAGRSLEEIDIIYAKSHEEGTQAWRVAAHLPKLSLQEVDDHANALGLYEDDLEKEDFAAEEEGKEAGAHGYALFARNTSTSNNEDGSSESEKDQNATPRA

SEQ ID NO: 320 - protein, 566 aa, Debaryomyces castellii
MDIIRARTNTGGLSGKKLRVAITIVATTGFSLFGYDQGLMSGIITGEQFNSEFPPTFSDPNASNAERRHATVIQGAVTSCYELGCFFGAIFALVRGDRVGRRPLIIVGSLIIILGTIISVTAFGPHWGLGQFVIGRVITGIGNGLNTATIPVWQSEMSRAENRGRLVNLEGSVVAVGTFIAYWLDFGLSYVDSSVQWRFPVAFQIVFAAVLFFGILQLPESPRWLVAHNRNPEASLILSKLKGLAIDDDEIIAETTVITDAVNRFSRSQVGFKELFSGGKSQHFSRMVIGSSTQFFQQFTGCNAAIYYSTVLFENTIFENSDKSPESIRRLSLILGGVFATVYALSTIPSFFLIDTLGRRNLFLIGATGQGVSFTITFACLIDPNEQNAKGAAVGLFLFIVFFAFTILPLPWIYPPEINPLRTRTVATAVSTCTNWICNFAVVMFTPIFVEDAGWGCYLFFAVVNYAFIPVIFFFYPETAGRTLEEVDIIFAKAFTDGRQPWRVAATLPKLSLKEIEEQGTLLGLYDNDFEKEKLEVNENATSSSSGKDADSNTDGILTENKTTGV

SEQ ID NO: 321 - protein, 291 aa, Danio rerio
MEYLENIRNLRGRCVLRRDIIREFLAELLGTFVLILFGCGSVAQTVLSREAKGQLLTIHFGFTLGVMLAVYMAGGVSGGHVNPAVSLAMVVLRKLPLKKFPVYVLAQFLGAFFGSCAVYCLYYDAFTEFANGELAVTGPNVTAGIFASYPREGLSLLNGFIDQVIGAGALVLCILAVVDKKNIGAPKGMEPLLVGLSILAIGVSMALNCGYPINPARDLGPRLFTAIAGWGLTVFSAGNGWWWVPVVGPMVGGVVGAAIYFLMIEMHHPENDKNLEDDNSLKDKYELNTVN

SEQ ID NO: 322 - protein, 291 aa, Pygoscelis adeliae
EEAKMSRKSKRSLKEKFALKNSLVKEALSEFLGTFILIALGCGCVGQAVLSRGAHGGPMTVSVGFAMAVTIAVYVSGGVSGGHINPAVSLAMCVTGRLKWTKLPIYILAQLLGAFVGAAAVFGIYYDAFMDYSNGTLEVTGPNATAHIFATYPAPYLSLINGFADQVMSTAVLLLGIFAIFDTKNNSVPKGLEPIAVGLLIIVLTCSLGMNSGCAMNPARDLGPRLFTAIAGWGMEVFTAGNNWWWVPIVAPMLGGVLGAIIYIIFIEIHHSDTQPGEENDVYDKYELTNM

SEQ ID NO: 323 - protein, 592 aa, Zygosaccharomyces rouxii
MGKRTQGFMDYVFSRTSTAGLKGARLRYTAAAVAVIGFALFGYDQGLMSGLITGDQFNKEFPPTKSNGDNDRYASVIQGAVTACYEIGCFFGSLFVLFFGDAIGRKPLIIFGAIIVIIGTVISTAPFHHAWGLGQFVVGRVITGVGTGFNTSTIPVWQSEMTKPNIRGAMINLDGSVIAFGTMIAYWLDFGFSFINSSVQWRFPVSVQIIFALVLLFGIVRMPESPRWLMAKKRPAEARYVLACLNDLPENDDAILAEMTSLHEAVNRSSNQKSQMKSLFSMGKQQNFSRALIASSTQFFQQFTGCNAAIYYSTVLFQTTVQLDRLLAMILGGVFATVYTLSTLPSFYLVEKVGRRKMFFFGALGQGISFIITFACLVNPTKQNAKGAAVGLYLFIICFGLAILELPWIYPPEIASMRVRAATNAMSTCTNWVTNFAVVMFTPVFIQTSQWGCYLFFAVMNFIYLPVIFFFYPETAGRSLEEIDIIFAKAHVDGTLPWMVAHRLPKLSMTEVEDYSQSLGLHDDENEKEEYDEKEAEANAALFQVETSSKSPSSNRKDDDAPIEHNEVQESNDNSSNSSNVEAPIPVHHNDP

SEQ ID NO: 324 - DNA, 19 bp, Artificial Sequence
  Artificial DNA Primer
tcttttcgcgccctggaaa

SEQ ID NO: 325 - DNA, 39 bp, Artificial Sequence
  Artificial DNA Primer
tttgttctagcttaattatagttcgttgaccgtatattc

SEQ ID NO: 326 - DNA, 1144 bp, Artificial Sequence
  Artificial DNA Construct - "Saccharomyces cerevisiae XII-2 homology region with Saccharomyces cerevisiae TEF2 promoter"
tcttttcgcgccctggaaaggcctaagtaatgtcgtaaacgcattctatctgtacttcaactctcctctgtgcattggtttgtgcaaatcacattttacgatactgccagatttatgcaaaaagagaaaaccatgggaccagaacaaagcaaaattacgataaacttcgaattccttcgtgcttgactaagacaaagggatggacgtagcgatttttagcgggccaagaactggttccgaaaaagcacaggtacaccgaaccctcagctaaggagggacagcaccgatgcggaaggacaaactttctttttgcctatcacagtatcttatcgagctaactattttcgacacacatgaaaaagcagaaatattaacgaaaaagaaaagaaagaccatgtcatgtacgggcaatcagaatctgtaacaagcgccattttttttttctgtatcgggccctccttactgctctccttccgtgtaacgcgttatgaaactctaatagctacctatattccaccataatatcaatcatgcggttgctggtgtatttaccaataatgtttaatgtatatatattaggggccgtatacttacatatagtagatgtcaagcgtaggcgcttcccctgccggctgtgacggcgccataaccaaggtatctatagaccgccaatcagcaaactacctccgtacattcatgttgcacccacacatgtacacacccagaccgcaacaaattacccataaggttgtttgtgacggcgtcgtacaagagaacgtgggaactttttaggctcaccaaaaaagaaaggaaaaatacgagttgctgacagaagcctcaagaaaaaaaaaattcttcttcgactatgctggaggcagagatgatcgagccggtagttaactatatatagctaaattggttccatcaccttcttttctggtgtcgctccttctagtgctatttctggcttttcctattttttttttttccatttttctttctctctttctaatatataaattctcttgcattttctatttttctctctatctattctacttgtttattcccttcaaggtttttttttaaggagtacttgtttttagaatatacggtcaacgaactataattaagctagaacaaa

SEQ ID NO: 327 - DNA, 729 bp, Artificial Sequence
  Artificial DNA Construct - "S. cerevisiae TEF2 promoter 3' homology region with Zygosaccharomyces rouxii glycerol transporter 5' homology region"
acttgtttttagaatatacggtcaacgaactataattaagctagaacaaaatgggcaaaagaactcaaggctttatggattatgtcttttctaggacctccacggctggcttgaaaggtgctcgtttaagatacactgccgcagcagttgccgtgatcggtttcgcactgtttggttatgatcaaggcttaatgtccggcttgattaccggtgatcagttcaacaaagaatttccaccaactaaatccaatggtgataatgatcgttacgcctctgttattcagggtgcagttacagcttgctacgaaatcggttgctttttcggatccttgtttgttttgtttttcggagacgccatagggagaaaacccttgatcatctttggtgccatcattgttatcattggtactgtcattagtactgctccgtttcatcatgcttggggactaggccaattcgtagtgggaagagtgatcactggtgttggaactgggttcaatacctcaacgattcctgtatggcaaagtgaaatgactaaaccaaacatcaggggtgccatgatcaatttggacggttccgtcattgcctttggtacaatgatcgcttactggctagactttggtttctccttcattaactcttctgttcagtggagatttccagtttcagtgcagatcatctttgctttagtcttgttattcggtattgttagaatgccggagtccccca

SEQ ID NO: 328 - DNA, 747 bp, Artificial Sequence
  Artificial DNA Construct - "S. cerevisiae TEF2 promoter 3' homology region with Schizosaccharomyces pombe glycerol transporter 5' homology region"
acttgtttttagaatatacggtcaacgaactataattaagctagaacaaaatgtctgtgcctctacgttttagtactccttcttctagcccatcagcatcagacaatgaatctgtgcacgacgatgggcctacgactgaattggatactttcaatacaacagatgtaccaaggagagtcaatacaactaaagctagacaaatgagaccaaagaataccttgaaagtcgccttcagctctccaaatcttaaaggattggacaataccgcagatagcgatagtcaaccttggttaggtggctatttggctggcagactagaggatatctcaggtcagagtagaaggaattacgtggatccctattacgaagaattgaatgctggcagaagaccgaacaaacctgtatggtcactaaacggtcctttaccccatgttcttgggaattctgttgtagaaaagatttcacagaaaaaccaagaggcaaggtcaagggcaaactctagagttaacagcagggcaaactccagagcaaatagttctgtctccttagccggtatggatgggagtccaaactggaagaggaaaatgaagtctgctgttttcggttctagagtcaagttgaatgatgaagaagcccaattgcctaggaacaaatcctctgtaagtattgctgaacaagctgccagcagacccaaagtcagtttttctctacaatcttctagacaaccatcaattgccgaagaacaac

SEQ ID NO: 329 - DNA, 666 bp, Artificial Sequence
  Artificial DNA Construct - "S. cerevisiae TEF2 promoter 3' homology region with Millerozyma farinosa glycerol transporter 5' homology region"
acttgtttttagaatatacggtcaacgaactataattaagctagaacaaaatgggattcgaactttgggggagaaccaatactggagggttgcgtggtagaccgttgcgtgtggctattacggctgtagctaccacgggattcagtcttttcggttacgatcaaggtttgatgtccggaatcattactggtacagagttcaatgaagaattccctccaacctggagtaagccacactacaatgcttctgagaaaagacacgctacggtagtacaaggtgccgtgacagcctgttacgaaattggttgctttttcggtgctctatttgcattggtcagaggtgatagaattggtagaagaccattggttattgtcggtgctgttttgataatcatagggactgtcatttccacagcagcttttggtgagcattgggggttgggccaattcgtaattggtagagtcattactggcataggaaacggaatgaatactgcaaccattccagtttggcagagtgagattagcagaccagagaatagaggcaaattggtgaatttggaaggttccgtaatagccattggaacattcgtcgcttactggattgattttggattgagctatgtaaactcaagcgttcagtggaggtttcctgtagcctttcaaa

SEQ ID NO: 330 - DNA, 200 bp, Artificial Sequence
  Artificial DNA Construct - "S. cerevisiae TEF2 promoter 3' homology region with Paramormyrops kingsleyae glycerol transporter 5' homology region"
acttgtttttagaatatacggtcaacgaactataattaagctagaacaaaatggagaccgaaagaaagcgtacaatgaaggaatgctgtgtcgtgagaaataggatctttagagagtttttggctgagttcttaggcactttcattttgatcttattcggttgtggcagtgttgcccagacagtcttatcaagaggcgct

SEQ ID NO: 331 - DNA, 200 bp, Artificial Sequence
  Artificial DNA Construct - "S. cerevisiae TEF2 promoter 3' homology region with Xenopus tropicalis glycerol transporter 5' homology region"
acttgtttttagaatatacggtcaacgaactataattaagctagaacaaaatgggtagacaaaaggatttcgttaacaaatgtaaccaaatgcttagattaaggaacaaattgctaaggcaagctttatcagagtgtttagggactttgatactagtcatgttcggttgcggttcagtcgcccaagtagttttgagtaaa

SEQ ID NO: 332 - DNA, 200 bp, Artificial Sequence
  Artificial DNA Construct - "S. cerevisiae TEF2 promoter 3' homology region with Plasmodium falciparum glycerol transporter 5' homology region"
acttgtttttagaatatacggtcaacgaactataattaagctagaacaaaatgcacatgttgttttacaagtcttatgtacgtgagttcattggcgaattccttggtaccttcgtgttgatgttcttaggagaaggtgccacagcaaactttcatacaaccggtttatctggtgattggtacaaactttgtttaggatgg

SEQ ID NO: 333 - DNA, 666 bp, Artificial Sequence
  Artificial DNA Construct - "S. cerevisiae TEF2 promoter 3' homology region with Millerozyma farinosa glycerol transporter 5' homology region"
acttgtttttagaatatacggtcaacgaactataattaagctagaacaaaatgggattcgaactttgggggagaaccaatactggagggttgcgtggtagaccgttgcgtgtggctattacggctgtagctaccacgggattctcccttttcggttacgatcaaggtttgatgagtggaatcattactggtacagagttcaatgaagaattccctccaacctggtccaagccacactacaatgcttctgagaaaagacacgctacggtagtacaaggtgccgtgacagcctgttacgaaattggttgctttttcggtgctctatttgcattggtcagaggtgatagaattggtagaagaccattggttattgtcggtgctgttttgataatcatagggactgtcattagtacagcagcttttggtgagcattgggggttgggccaattcgtaattggtagagtcattactggcataggaaacggaatgaatactgcaaccattccagtttggcagtccgagattagcagaccagagaatagaggcaaattggtgaatttggaaggtagtgtaatagccattggaacattcgtcgcttactggattgattttggattgagctatgtaaactcaagcgttcagtggaggtttcctgtagcctttcaaa

SEQ ID NO: 334 - DNA, 200 bp, Artificial Sequence
  Artificial DNA Construct - "S. cerevisiae TEF2 promoter 3' homology region with Xenopus laevis glycerol transporter 5' homology region"
acttgtttttagaatatacggtcaacgaactataattaagctagaacaaaatggtcagtcacttggcattcttgaaaaacatgaagctaaagcttagaacacagaatttgtatgttagatgtggtttagctgaattcttgggcacattgatcttaatcttgtttggctgcggtagcgtcgctcaaatggaattgtccggt

SEQ ID NO: 335 - DNA, 573 bp, Artificial Sequence
  Artificial DNA Construct - "S. cerevisiae TEF2 promoter 3' homology region with Torulaspora delbrueckii glycerol transporter 5' homology region"
acttgtttttagaatatacggtcaacgaactataattaagctagaacaaaatgaccggattctctctattcggatatgaccaaggattgatggcctccttgataactggtacacagttcaactatgaatttccagccactaagtcaaagtcagataacgatacacacgcctctacggtccaaggtgcagttactagttgttacgaaatcggctgcttctttggctccttattcgttatgttctatggtgaaaagatcggtaggaaaccgcttattgtaatcgggagtgtcattacaatcgtgggtgctgtcatttcaacgaccgccttcagagactattgggctcttggccaattcgttgttgggagagtgatcaccggagtaggtacaggtctgaatacatccactatccctgtatggcaatccgaaatgtcagatccttctattaggggtatcttagtaaatcttgaaggttcaactattgcaattgggactatgttggcctattggatagatttcggctttagctttatcgatagttctgtacagtggaggttcccagtttcaatgcaaa

SEQ ID NO: 336 - DNA, 651 bp, Artificial Sequence
  Artificial DNA Construct - "S. cerevisiae TEF2 promoter 3' homology region with Debaryomyces castellii glycerol transporter 5' homology region"
acttgtttttagaatatacggtcaacgaactataattaagctagaacaaaatggacattatcagggctagaaccaatactggtggactttctggcaaaaagttgagggtagctataacgattgtggcaactacgggtttcagtttgtttgggtatgatcagggcttgatgtccggaatcatcacaggcgaacagttcaatagtgagtttcccccaactttttccgatccaaatgcttcaaacgctgaaaggaggcatgccactgtgattcaaggtgctgtgacatcatgctatgagttaggatgtttctttggggctatctttgccttggttagaggtgatagggtaggtaggagacctttgatcattgttggttcattgatcatcatcttaggtaccatcatatctgttacagcttttgggcctcactggggtttaggccaatttgttataggtagggtcataacgggtataggtaacggcttgaatactgctactattcctgtatggcagtccgagatgtcaagagccgagaatagagggcgtttagttaatctggaaggttctgtagttgcagttggtacgttcattgcatattggttagatttcggtctatcctacgtcgatagcagcgttcaatggagatttccgg

SEQ ID NO: 337 - DNA, 300 bp, Artificial Sequence
  Artificial DNA Construct - "S. cerevisiae TEF2 promoter 3' homology region with Danio rerio glycerol transporter 5' homology region"
acttgtttttagaatatacggtcaacgaactataattaagctagaacaaaatggagtacctagaaaacatcagaaatctaaggggaaggtgcgtgttgagaagggacatcattagagagtttttggcagaattacttggtacctttgtcttgattctttttggatgcggctctgtggcccaaactgtattgtctcgtgaagcaaaagggcagcttttgacaatccactttggctttacacttggtgtaatgctggccgtatacatggctggcggtgtatctggtggccatgtaaatccag

SEQ ID NO: 338 - DNA, 303 bp, Artificial Sequence
  Artificial DNA Construct - "S. cerevisiae TEF2 promoter 3' homology region with Pygoscelis adeliae glycerol transporter 5' homology region"
acttgtttttagaatatacggtcaacgaactataattaagctagaacaaaatggaagaggcaaagatgtcccgtaaatcaaagaggagtctaaaggagaagtttgcattgaagaattcattggttaaagaagctttatccgaattcttaggcacctttatcttgatagcccttggttgcggctgtgttggacaagctgtgttaagtagaggtgcccacggaggacccatgactgtgtctgtaggctttgcaatggccgtgacaatagctgtgtacgtttcaggtggggtctcaggtggtcaca

SEQ ID NO: 339 - DNA, 1200 bp, Artificial Sequence
  Artificial DNA Construct - "Zygosaccharomyces rouxii glycerol transporter 3' homology region with S. cerevisiae TEF1 terminator 5' homology region"
ctttgctttagtcttgttattcggtattgttagaatgccggagtcccccagatggttgatggctaagaaaagaccagcagaagctagatatgtgttggcttgcttgaatgatttgccagaaaatgatgatgccattctagccgagatgacttcacttcatgaagccgtgaataggtcatcaaaccaaaagagtcaaatgaagtccttgtttagcatggggaagcagcagaacttttcaagggccttgatagcaagttcaacccagttctttcaacaattcacaggttgcaatgcagcaatctactattcaacggtgttgtttcaaactaccgttcaacttgataggttgttagccatgattttgggtggcgttttcgcaactgtttacactctgagtactcttccttccttttacctagttgagaaggtaggaagaaggaaaatgttcttctttggtgcactaggtcaaggaatttcctttatcattaccttcgcatgtttagtgaatccaactaagcaaaacgcaaagggtgctgccgtaggtctttacttgttcatcatttgtttcggtttggctattctagagttaccttggatatacccacctgaaatcgccagtatgagagtgagagcagccacaaacgcaatgtccacctgtacgaactgggttacgaactttgccgttgtaatgtttacccctgtgttcattcaaacctctcaatggggatgttacttgttctttgctgttatgaacttcatctatctgcctgtcatattcttcttttaccctgaaacagctgggagatctctggaagaaattgacataatcttcgccaaagctcatgtagacggtacacttccgtggatggtggctcataggcttcccaagttatctatgactgaagtagaagactattcacaaagtctgggtttacatgacgatgaaaatgaaaaagaagagtacgatgaaaaagaagccgaagcaaatgctgccttgttccaagtcgaaacgtcatcaaaatctcccagttcaaatagaaaagacgatgatgctcctattgaacacaacgaagtgcaagaatcaaatgacaattcttccaactcttcaaatgtagaagcccctattccagttcaccacaatgatccataaggagattgataagacttttctagttgcatatcttttatatttaaatctta

SEQ ID NO: 340 - DNA, 1200 bp, Artificial Sequence
  Artificial DNA Construct - "Schizosaccharomyces pombe glycerol transporter 3' homology region with S. cerevisiae TEF1 terminator 5' homology region"
cagtttttctctacaatcttctagacaaccatcaattgccgaagaacaacctcaaactcaaagaaaatcatccgcaatcactgtcgagcacgcagaaaatgccgaaccagagacgccaaggaacaatgtgtctttcagtagaaagccgtccatagcagagcaggacagcagccaggacattacaatgcctccaaacgaaatcattgccgaggaatcattggattccggttcagacacagaaaccctgtacttgaattactggtgcaagataagacacttctttagggaaggttttgcagagttcttgggtactctagttctggtagtttttggggttgggagtaatcttcaagctactgtcacaaatggggcaggtggatctttcgaatcactatcctttgcttggggatttggatgcatgttaggtgtctacattgccggtggaattagcggaggtcatgtcaatccggcagtcactattagcttagctatcttcaggaagtttccatggtacaaagttcccatttacatcttctttcagatatggggtgccttctttggtggcgctttagcctatggttaccattggtcctctataaccgaattcgaagggggtaaggatatacgtactccagctacaggtggctgcttgtatacaaacccaaaaccctacgttacctggagaaatgcctttttcgacgagttcattgggacagctgtactggtaggatgcttgtttgcaatcctggatgatacgaattccccaccaacacaggggatgactgctttcatagtcggtttacttattgccgctatcggtatggcacttggatatcaaacttcttttacactaaatccagcaagagatcttgggccaagaatgttcgcttggtggattggttatggccctcattcctttcatctttatcactggtggtggacttggggtgcatggggtggaactattggtggtggcattgctggtggtttgatctatgatctagtcattttcacaggtccggaatcaccattgaactatccagataacggcttcatagacaaaaaggtccatcagattaccgccaaattcgaaaaagaagaagaagttgaaaatcttgagaaaacagattctcctattgaaaacaattaaggagattgataagacttttctagttgcatatcttttatatttaaatctta

SEQ ID NO: 341 - DNA, 1200 bp, Artificial Sequence
  Artificial DNA Construct - "Millerozyma farinosa glycerol transporter 3' homology region with S. cerevisiae TEF1 terminator 5' homology region"
gagctatgtaaactcaagcgttcagtggaggtttcctgtagcctttcaaattgtctttgccgctggcctattgggaggtatcttgttcatgccagagtcaccaagatggcttttggcccatggcaagaaagaacaggctcatattgtcttgggtgctctaaatgatttggatccaaatgacgatcatgtattggctgaaagtactgtaatcacagatgccattaaccgtttcagtcgttctcagctaggctttaaggaattgatgtcaggaggcaagaatcagcattttgcaagaatggttattggtagttcaacacaattctttcaacagttcacaggttgtaacgctgctatctactattccacagttctgtttgaagagactatcttcgtaggagatcgtcgtctgagcctggtgatgggtggtgtcttcgcaagtgtatacgctcttgccacaattccaagtttctttttggtcgataaactagggagaagaaatctgttcttgattggagctaccggtcaagccttatcttttacaatcacctttgcttgtttgattaaccctactaaacagaatgccaagggtgccgcagttggcatattcttattcataacattctttgcctttaccatcttaccattgccttggatttaccctcctgagattaacccacttcgtacaagaactgtggcatctgctgtctcaacgtgtaccaattggttgaccaatttcgccgtagttatgtttactcccatcttcatcaatgatgcccaatggggttgttacttgttctttgcctgcttgaactatgccttcatacccgtaatcttctggttctacccagagacagccggtcgttctttagaggaaattgacataatcttcgccaaggcttataccgatggtcgtcctccatggcgtgttgcagctactatgccgcacctatctctgaaggaacaagaggaacaaggaatgcaactagggctgtatgataacgaagcagaaaaacaaaagttcgagcaaactgaaaatcttatgagttccagcagctctgccaaattgcctgaggaaggttcaaatgttaatgaaaacgaaaatgagaatacaaacgagaaagatcaaacgccaaaaccaacagatgtttaaggagattgataagacttttctagttgcatatcttttatatttaaatctta

SEQ ID NO: 342 - DNA, 932 bp, Artificial Sequence
  Artificial DNA Construct - "Paramormyrops kingsleyae glycerol transporter 3' homology region with S. cerevisiae TEF1 terminator 5' homology region"
atggagaccgaaagaaagcgtacaatgaaggaatgctgtgtcgtgagaaataggatctttagagagtttttggctgagttcttaggcactttcattttgatcttattcggttgtggcagtgttgcccagacagtcttatcaagaggcgctctaggtgagccccttacaatacacatcggtttcactttaggcgttatgatggccgtgtatgtcgctggtggcgtttcaggtgcccacatcaatcctgccgtgtctttggctatggttgtgcttgggaggttgaaattggttaagttccccgtttacgttatggcccaattcttaggcgcatttgtaggtgctgccgctgtattctgtctgtactacgacgcctttatggactttacttcaggtattctttctgtgacaggcataaacgctacagctcacatctttgctagctatccttctcgtcatctatccattatcaacggtttcattgaccaagtctttggaaccggtatcctagtcttatgcatcttagccatcatagatggcaagaatatcggagcacctaggggtatggaacctcttgtgatagggttgatcatacttggtataggtgtgtctatggggttgaattgcggttatcccttgaatcccgcaagggatttaggacctagagtctttacagctgttgcaggttggggaatggaggtctttagtacagcagattactggtggtggattcccgttgccggaccgttagttggtggcgttgtaggtggtgccatctacttcttattcattgaattgcatcatgaatctgagccagttaccgaacaagaagaagaagaaagttcatccatacaagacaaatacgaaatgatcgccgtatcttaaggagattgataagacttttctagttgcatatcttttatatttaaatctta

SEQ ID NO: 343 - DNA, 929 bp, Artificial Sequence
  Artificial DNA Construct - "Xenopus tropicalis glycerol transporter 3' homology region with S. cerevisiae TEF1 terminator 5' homology region"
atgggtagacaaaaggatttcgttaacaaatgtaaccaaatgcttagattaaggaacaaattgctaaggcaagctttatcagagtgtttagggactttgatactagtcatgttcggttgcggttcagtcgcccaagtagttttgagtaaaggttcccatggtcagtttttgacggttaatcttgcattcggttttgctgttatgttgggcatattgatatccggtcaagtatctggtggtcacttaaacccagctgtcactttcgcactatgcattcttgctagagaaccatgggtcaagttccctgtttactctattgcacaaacattaggcgcatttctaggtgctggcatcatctatggcttatactatgacgccatttggtacttcgccaacgatcagttgtatgttactggtgaaaacggcacagcaggcatattcactacctttccatcagaccacttaaccttaatgaacggcttctttgatcaattcattgggaccgcagctttggtagtttgtgtattagctattgtcgatccaaacaacaatccaatccccagaggcttagaggcctttactgtcggattcgtggtacttgtaattggcacaagtatgggtttcaattccggttatgctgttaatccagccagagactttggtccaagactattcacgtcactagccggatggggtacagaagtcttttgggctgggaatcaatggtggtgggtgccaatagtttcaccattgttaggcgcatttgcaggagttcttgtttatcaattgatgatcgggtgtcacattgagcctgtgccgcaaagtactgaacaagagaatatcaaattggccgatgtgaagcccaaagataggatctaaggagattgataagacttttctagttgcatatcttttatatttaaatctta

SEQ ID NO: 344 - DNA, 827 bp, Artificial Sequence
  Artificial DNA Construct - "Plasmodium falciparum glycerol transporter 3' homology region with S. cerevisiae TEF1 terminator 5' homology region"
atgcacatgttgttttacaagtcttatgtacgtgagttcattggcgaattccttggtaccttcgtgttgatgttcttaggagaaggtgccacagcaaactttcatacaaccggtttatctggtgattggtacaaactttgtttaggatggggattagccgtcttctttggcatcttggtttctgctaagctatccggtgcacacttgaacttagcagtgtctatcggtctttcatccatcaacaaattcgacttgaagaagattccagtctacttctttgcacaacttttaggtgcctttgttggaacctccactgtgtatggcttgtatcacggcttcatatcaaattccaagattccccaatttgcctgggagacgtctagaaaccccagtatttcattgactggtgccttctttaacgaattgattttgacaggcatcttgttgttagtcattttggtcgttgtcgacgaaaacatttgcggcaagtttcatattctaaagctatcctctgtggttggcttgatcattttgtgcattggtataacttttggcggtaatacaggttttgccttaaacccctctagagacctaggcagcaggttcttatcattgattgcttatgggaaggatacctttacaaaggacaacttctacttttgggtaccattggttgcaccttgtgttggttccgtagtcttttgccagttctatgataaagtcatttgtcctttggttgatttagcaaacaatgaaaaagacggcgtagacttataaggagattgataagacttttctagttgcatatcttttatatttaaatctta

SEQ ID NO: 345 - DNA, 1200 bp, Artificial Sequence
  Artificial DNA Construct - "Millerozyma farinosa glycerol transporter 3' homology region with S. cerevisiae TEF1 terminator 5' homology region"
gagctatgtaaactcaagcgttcagtggaggtttcctgtagcctttcaaattgtctttgccgctggcctattgggaggtatcttgttcatgccagagtcaccaagatggcttttggcccatggcaagaaagaacaggctcatattgtcttgggtgctctaaatgatttggatccaaatgacgatcatgtattggctgaatccactgtaatcacagatgccattaaccgtttctcccgttctcagctaggctttaaggaattgatgtcaggaggcaagaatcagcattttgcaagaatggttattggttcctcaacacaattctttcaacagttcacaggttgtaacgctgctatctactatagtacagttctgtttgaagagactatcttcgtaggagatcgtcgtctgagcctggtgatgggtggtgtcttcgcatccgtatacgctcttgccacaattccatccttctttttggtcgataaactagggagaagaaatctgttcttgattggagctaccggtcaagccttatcttttacaatcacctttgcttgtttgattaaccctactaaacagaatgccaagggtgccgcagttggcatattcttattcataacattctttgcctttaccatcttaccattgccttggatttaccctcctgagattaacccacttcgtacaagaactgtggcatctgctgtctcaacgtgtaccaattggttgaccaatttcgccgtagttatgtttactcccatcttcatcaatgatgcccaatggggttgttacttgttctttgcctgcttgaactatgccttcatacccgtaatcttctggttctacccagagacagccggtcgttctttagaggaaattgacataatcttcgccaaggcttataccgatggtcgtcctccatggcgtgttgcagctactatgccgcacctatctctgaaggaacaagaggaacaaggaatgcaactagggctgtatgataacgaagcagaaaaacaaaagttcgagcaaactgaaaatcttatgtccagtagcagctctgccaaattgcctgaggaaggttcaaatgttaatgaaaacgaaaatgagaatacaaacgagaaagatcaaacgccaaaaccaacagatgtttaaggagattgataagacttttctagttgcatatcttttatatttaaatctta

SEQ ID NO: 346 - DNA, 944 bp, Artificial Sequence
  Artificial DNA Construct - "Xenopus laevis glycerol transporter 3' homology region with S. cerevisiae TEF1 terminator 5' homology region"
atggtcagtcacttggcattcttgaaaaacatgaagctaaagcttagaacacagaatttgtatgttagatgtggtttagctgaattcttgggcacattgatcttaatcttgtttggctgcggtagcgtcgctcaaatggaattgtccggtttcgctaaggcccagttcttatccgtcaatatggcttttggctttgcagtcactgccggtgcatatgtgtgcgctggtgtgtctggcgcacacttgaatccggctgtttctttggctatgttcatcttgaagaaattgtcttggaagttgttcttgatctattgcttggcccagttcctaggtgccttcattggggctgcactagttttcagtctatactacgatgctttacatgtctattcaaatggcaattggacagtatatggcccacaatcaactgctggcattttcgctagttatccgtcagagcacttaagcgtcattaacggtttcacagaccaagtaatagctaccgcagccttgttgatttgtatcctagccatcttagatgaagccaacaatgcagcaccacgtggtttacagccctttttgattggcataatggtcttattggtgggtctggccatgggtttcaattgtggatatccgatcaaccctgctagagatctagctcctagattctttactgcaattgctggatggggctctgaagtgttctcagctggcggtcattggtggtgggttcccgtcctgggtcctcttgtcggtggagttgtcggagctgtcatctatgaggttttcattgaatttcatcatccgtcaccaaaccaaaaacaagaaagtgaagagcctacagaaggtatcaatcgtccacactacgagttagttcaatctagtgcataaggagattgataagacttttctagttgcatatcttttatatttaaatctta

SEQ ID NO: 347 - DNA, 1200 bp, Artificial Sequence
  Artificial DNA Construct - "Torulaspora delbrueckii glycerol transporter 3' homology region with S. cerevisiae TEF1 terminator 5' homology region"
tagctttatcgatagttctgtacagtggaggttcccagtttcaatgcaaatcctatttgccttgatcttatgctttatgattgtcaatctgccagaaagtcccagatggttgatttcccagtcaagaactgaggaagcccgttacttacttggtcaattagatgacgtcgacccaaatgatgataggattgtcgctgaagttgctatgattcatgatgctgtgaatagaagtaagcaagaaaagaattctatgtcagtgttattctctgggggtaagagtcagaatatgcaaagggcattggttgctgctagtactcagttctttcaacagtttacgggttgtaacgcagccatctattactctaccgtcttattccatgagactatccaactgagtcccagattgtctatgatcttaggcgcagttttctctactgtttacgccttatctacaatcccatcattcttcttgatagaaaggttaggccgtaggaagttgttcttattgggagccacaggtcaagctattagcttcacaatcacgtttgcatgtttagttagacaaaccgaggaaaatgctaaaggtgctgcagtcggattgtttttgtttatcgtcttcttcggctgctctatgctttccctgccctggatctatcctccagaaattgccagtatgaaagtccgtgcttctacaaatgcattctcaacttgcacaaactggttgtgcaactttgctgttgtaatgtttaccccaatcttcatcaacaaatccggctggggatgttacttattcttcgcctgtatcaactatttgtatatccctgtcatcttcttcttctatccagagactgctggtcgttctctagaagagatcgacatcatctatgctaaatctcatgaggagggcacccaggcatggagagtggctgctcacttgccaaagctatctctacaagaagttgatgaccacgcaaatgctctaggtctgtatgaagacgatttagaaaaagaagattttgctgctgaagaggagggtaaggaagcaggcgctcacggttacgctctattcgctagaaatacgagcacctcaaacaacgaagatggtagtagtgaatctgagaaagaccagaatgccactccccgtgcataaggagattgataagacttttctagttgcatatcttttatatttaaatctta

SEQ ID NO: 348 - DNA, 1200 bp, Artificial Sequence
  Artificial DNA Construct - "Debaryomyces castellii glycerol transporter 3' homology region with S. cerevisiae TEF1 terminator 5' homology region"
agatttcggtctatcctacgtcgatagcagcgttcaatggagatttccggtagctttccaaatcgttttcgcagcagtattgtttttcggcatattgcaactgcccgaaagtcctagatggttggtcgctcacaacagaaacccagaagcaagccttattctgtcaaagcttaaaggtctggctattgatgacgatgagatcatagcagaaactacagtcataaccgatgctgtcaatagattttccagatcacaggttggcttcaaagagctgttctctggcggtaagagtcaacatttctcaagaatggtaataggttcatctacgcagttctttcaacagtttactggttgtaatgcagcaatctattacagtaccgtattgtttgagaatactatcttcgaaaactcagataagtctcctgagtctatccgtaggttatcattgatcttaggtggggtgtttgctacagtctacgcactatccaccattcccagcttctttttgatagacacattgggcagaagaaacctgttcttgattggtgccactggtcaaggtgtctcttttaccattacttttgcatgccttattgatccaaacgaacagaatgctaaaggggctgccgtgggtttgtttttgttcatagtctttttcgcatttacaattctgcctttaccttggatctatcctcctgagataaaccctttaagaaccagaaccgtggcaacagctgtgtcaacttgtaccaattggatatgcaactttgccgtagtaatgttcacacccatctttgttgaggatgctggttggggatgctacttgttctttgcagttgtcaattacgccttcattccagtgatctttttcttctaccctgaaacagccggtcgtacactggaagaggttgatatcatctttgctaaagccttcaccgacggtagacagccatggcgtgtcgctgctaccttgcccaaattgagtctgaaggaaattgaggaacaaggaacgttgttaggcttgtatgataacgactttgaaaaggaaaagttggaagtaaacgagaacgctacttcctccagttcaggaaaggacgccgatagcaatacagatgggatattgacagagaacaaaacaacaggtgtttaaggagattgataagacttttctagttgcatatcttttatatttaaatctta

SEQ ID NO: 349 - DNA, 926 bp, Artificial Sequence
  Artificial DNA Construct - "Danio rerio glycerol transporter 3' homology region with S. cerevisiae TEF1 terminator 5' homology region"
atggagtacctagaaaacatcagaaatctaaggggaaggtgcgtgttgagaagggacatcattagagagtttttggcagaattacttggtacctttgtcttgattctttttggatgcggctctgtggcccaaactgtattgtctcgtgaagcaaaagggcagcttttgacaatccactttggctttacacttggtgtaatgctggccgtatacatggctggcggtgtatctggtggccatgtaaatccagccgtttctttggctatggtggtcctgaggaagttaccattgaagaagttcccagtatatgttctggctcagttccttggagccttctttggtagctgtgcagtctattgcttatactacgatgcatttacagaatttgcaaatggtgagttggccgttacaggacccaatgtaactgctggcatctttgcctcttatccacgtgaaggcttatcactgcttaatgggtttatcgatcaggttataggcgctggcgcattggtcttatgtatacttgcagtagtagacaagaaaaacataggagcacctaaagggatggaaccccttttagtgggtttgagtatcttagcaattggcgttagcatggccttaaactgtggttatcctatcaaccctgcaagagatttaggaccaaggttgttcactgctatagctggttggggtcttactgttttcagtgctggtaacggttggtggtgggtgccagtcgttgggcctatggttggcggtgtagttggcgcagccatctactttcttatgatagaaatgcatcatccagagaatgataagaacttggaagatgacaattccttaaaggacaaatacgaactgaatacggtcaactaaggagattgataagacttttctagttgcatatcttttatatttaaatctta

SEQ ID NO: 350 - DNA, 926 bp, Artificial Sequence
  Artificial DNA Construct - "Pygoscelis adeliae glycerol transporter 3' homology region with S. cerevisiae TEF1 terminator 5' homology region"
gaagaggcaaagatgtcccgtaaatcaaagaggagtctaaaggagaagtttgcattgaagaattcattggttaaagaagctttatccgaattcttaggcacctttatcttgatagcccttggttgcggctgtgttggacaagctgtgttaagtagaggtgcccacggaggacccatgactgtgtctgtaggctttgcaatggccgtgacaatagctgtgtacgtttcaggtggggtctcaggtggtcacatcaatccagctgtttcactggccatgtgcgtaactggtagactgaagtggacaaagttgccaatctatatcctggcccagttgttaggtgctttcgttggagcagctgccgtattcgggatctactatgatgcctttatggactattccaatgggacattagaagtgactggtccaaatgctacagctcacatctttgctacgtatcccgcaccatacctttctttgattaacggtttcgcagatcaggttatgtccactgctgttttgttacttggcatctttgccatctttgacacaaagaataactcagtgccaaaaggccttgaaccgattgctgtaggcttgttgattatcgttttgacgtgctcacttggtatgaatagtgggtgcgcaatgaatccagcaagggatctaggtcctagattgtttacagctatagctggctggggtatggaagtctttaccgctggtaacaattggtggtgggtcccgattgttgctcccatgttaggtggcgtcttgggtgccattatctacatcatcttcattgaaattcaccattcagacacacaacctggtgaagaaaacgatgtatacgataagtatgagttgacgaacatgtaaggagattgataagacttttctagttgcatatcttttatatttaaatctta

SEQ ID NO: 351 - DNA, 32 bp, Artificial Sequence
  Artificial DNA Primer
ggagattgataagacttttctagttgcatatc

SEQ ID NO: 352 - DNA, 32 bp, Artificial Sequence
  Artificial DNA Primer
tcagtccaatgacagtattttctccttctcac

SEQ ID NO: 353 - DNA, 643 bp, Artificial Sequence
  Artificial DNA Construct - "S. cerevisiae TEF1 terminator with S. cerevisiae XII-2 homology region"
ggagattgataagacttttctagttgcatatcttttatatttaaatcttatctattagttaattttttgtaatttatccttatatatagtctggttattctaaaatatcatttcagtatctaaaaattcccctcttttttcagtttttcttaacgcgtccttgtactgcgtctaacgcttttgccacttggatttctattataggaaatagtctcacttactgggcgacgaattttcgcgttttgatgaagcacaggaagaatttcttttttttttggcttcttctggttccgttttttacgcgcacaaatctaaaaaaagaaataattataacctagtctcgaaaattttcatcgatccattcgttcctttttttcgattttttcagatcaaaattcttgtttctttctttgtcttagtttatattaaaagatattttgattttactcctgaactatttattctttctaagaaggccagaacactacagctgttttaaccgactacgaagttctccattctcgaacactagccttcatttaccaaacaggaactagcgtatatcattagtccttattcgaaaagagattggtagatatttattgtagtttgtgagaaggagaaaatactgtcattggactga

SEQ ID NO: 354 - protein, 514 aa, Arabidopsis thaliana
MAGGAFVSEGGGGGRSYEGGVTAFVIMTCIVAAMGGLLFGYDLGISGGVTSMEEFLTKFFPQVESQMKKAKHDTAYCKFDNQMLQLFTSSLYLAALVASFMASVITRKHGRKVSMFIGGLAFLIGALFNAFAVNVSMLIIGRLLLGVGVGFANQSTPVYLSEMAPAKIRGALNIGFQMAITIGILVANLINYGTSKMAQHGWRVSLGLAAVPAVVMVIGSFILPDTPNSMLERGKNEEAKQMLKKIRGADNVDHEFQDLIDAVEAAKKVENPWKNIMESKYRPALIFCSAIPFFQQITGINVIMFYAPVLFKTLGFGDDAALMSAVITGVVNMLSTFVSIYAVDRYGRRLLFLEGGIQMFICQLLVGSFIGARFGTSGTGTLTPATADWILAFICVYVAGFAWSWGPLGWLVPSEICPLEIRPAGQAINVSVNMFFTFLIGQFFLTMLCHMKFGLFYFFASMVAIMTVFIYFLLPETKGVPIEEMGRVWKQHWFWKKYIPEDAIIGGHDDNNTN

SEQ ID NO: 355 - protein, 374 aa, Arabidopsis thaliana
MAHPSLTLFFQSTPVYLSEMAPAKIRGALNIGFQMAITIGILIANLINYGTSQMAKNGWRVSLGLAAVPAVIMVIGSFVLPDTPNSMLERGKYEQAREMLQKIRGADNVDEEFQDLCDACEAAKKVDNPWKNIFQQAKYRPALVFCSAIPFFQQITGINVIMFYAPVLFKTLGFADDASLISAVITGAVNVVSTLVSIYAVDRYGRRILFLEGGIQMIVSQIVVGTLIGMKFGTTGSGTLTPATADWILAFICLYVAGFAWSWGPLGWLVPSEICPLEIRPAGQAINVSVNMFFTFLIGQFFLTMLCHMKFGLFYFFGGMVAVMTVFIYFLLPETKGVPIEEMGRVWKQHPFWKRYMPDDAVIGGGEENYVKEV

SEQ ID NO: 356 - protein, 514 aa, Physcomitrella patens
MAGGGVVSYHGMKADQYGGKVTVFVVMACIVAASGGLLFGYDIGISGGVTAMDDFLIKFFPHVYRNKHSNDLHESHYCKYDDQGLQLFTSSLYLAGLVATFFASYTTRLLGRKVSMLIAGLAFLAGSIFNAAAVNLAMLIIGRLLLGAGVGFANQSVPLYLSEMAPARLRGGLNIMFQLATTIGILAASLINYGTAKVHPWGWRLSLGLAAVPAVLLTLGGLFCPETPNSLIERGKTEQGRHILTRIRGTDDVNAEYDDMVEASEIAQRVKHPFRNLLQKRNRPQLVMAIAIPFFQQVTGINAVMFYIPVLFNTIGFSTNASLYSAVITGAVNVVATLVSLGVVDKWGRRVLFLQGGMQMLISQVIIGIILALKFSGTNELSKGEAMAIVILVCIYVAAFAWSWGPLGWLVPSEIFPIETRSAGMAITVCVNLIFTFVIAQAFLTILCHFEYGIFLFFAGWVVIMTVFIALFLPETKGVPIEEMIYVWRQHWFWKRIVPADDLPVHGEKPKVAD

SEQ ID NO: 357 - protein, 516 aa, Brassica napus
MAGGAFVSEGSGGGSYEGGVTGFVIMTCIVAAMGGLLFGYDLGISGGVTSMEEFLSKFFPEVDRQMHNARRETAYCKFDNQLLQLFTSSLYLAALVSSFAASAVTRKYGRKISMFVGGVAFLIGSLFNAFATNVAMLIIGRLLLGVGVGFANQSTPVYLSEMAPAKIRGALNIGFQMAITIGILIANLINYGTSQMARNGWRVSLGLAAVPAVVMVIGSFVLPDTPNSMLERGKYEQAREMLQKIRGADNVDEEFQDLCDACESAKKVEHPWKNIFQEAKYRPALVFCSMIPFFQQFTGINVIMFYAPVLFKTLGFADDASLISAVITGVVNVVSTLVSIYAVDRYGRRLLFLEGGIQMIICQIIVGSLIGAKFGTTGSGTLTPATADWVLAFICIYVAGFAWSWGPLGWLVPSEICPLEVRPAGQAINVSVNMFFTFLIGQFFLTMLCHMKFGLFYFFGGMVLIMTIFIYFLFPETKGVPIEEMGRVWKAHPFWKRYVPDDAVIGGSGETYVKEV

SEQ ID NO: 358 - protein, 672 aa, Homo sapiens
MEEHTEAGSAPEMGAQKALIDNPADILVIAAYFLLVIGVGLWSMCRTNRGTVGGYFLAGRSMVWWPVGASLFASNIGSGHFVGLAGTGAASGLAVAGFEWNALFVVLLLGWLFAPVYLTAGVITMPQYLRKRFGGRRIRLYLSVLSLFLYIFTKISVDMFSGAVFIQQALGWNIYASVIALLGITMIYTVTGGLAALMYTDTVQTFVILGGACILMGYAFHEVGGYSGLFDKYLGAATSLTVSEDPAVGNISSFCYRPRPDSYHLLRHPVTGDLPWPALLLGLTIVSGWYWCSDQVIVQRCLAGKSLTHIKAGCILCGYLKLTPMFLMVMPGMISRILYPDEVACVVPEVCRRVCGTEVGCSNIAYPRLVVKLMPNGLRGLMLAVMLAALMSSLASIFNSSSTLFTMDIYTRLRPRAGDRELLLVGRLWVVFIVVVSVAWLPVVQAAQGGQLFDYIQAVSSYLAPPVSAVFVLALFVPRVNEQGAFWGLIGGLLMGLARLIPEFSFGSGSCVQPSACPAFLCGVHYLYFAIVLFFCSGLLTLTVSLCTAPIPRKHLHRLVFSLRHSKEEREDLDADEQQGSSLPVQNGCPESAMEMNEPQAPAPSLFRQCLLWFCGMSRGGVGSPPPLTQEEAAAAARRLEDISEDPSWARVVNLNALLMMAVAVFLWGFYA

SEQ ID NO: 359 - protein, 511 aa, Glycine max
MAGGAYVDSGNAKQFDGKVTAFVLVTCFVAAMGGLLFGYDLGITGGVTSMEPFLIKFFPGVYKQMQDDVGHRSQYCKFDNELLTLFTSSLYLAALVASFFASTTTRMMGRKASMFLGGLFFLVGALLNGFAVNIEMLIIGRLLLGFGVGYCNQSVPVYLSEMAPAKIRGALNMGFQMMITIGILIANLINYGTSKLENGWRISLGVGAVPAVLLCFGALFLGDTPNSLIERGQKEEARKMLQKIRGIDNVEEELQELVLASESAKEVEHPWKNITTPKYRPQLTFCTLIPFFQQLTGINVVMFYAPVLFKTLGFGNDASLMSSVITGGVNVVATLVSILTVDKVGRKVLFLEGGVQMLICQIATGVMIAMKFGVSGEGSFSSGEANLILFFICAFVAAFAWSWGPLGWLVPSEICPLEVRSAGQAINVAVNMLFTFAIAQVFLVMLCHLKFGLFFFFAAFVLIMTIFIAMLLPETKNIPIEEMHTVWRSHWFWSKIVPHADDDRKPEAAQS

SEQ ID NO: 360 - protein, 507 aa, Arabidopsis thaliana
MAVVVSNANAPAFEAKMTVYVFICVMIAAVGGLIFGYDIGISGGVSAMDDFLKEFFPAVWERKKHVHENNYCKYDNQFLQLFTSSLYLAALVASFVASATCSKLGRRPTMQFASIFFLIGVGLTAGAVNLVMLIIGRLFLGFGVGFGNQAVPLFLSEIAPAQLRGGLNIVFQLMVTIGILIANIVNYFTATVHPYGWRIALGGAGIPAVILLFGSLLIIETPTSLIERNKNEEGKEALRKIRGVDDINDEYESIVHACDIASQVKDPYRKLLKPASRPPFIIGMLLQLFQQFTGINAIMFYAPVLFQTVGFGSDAALLSAVITGSINVLATFVGIYLVDRTGRRFLLLQSSVHMLICQLIIGIILAKDLGVTGTLGRPQALVVVIFVCVYVMGFAWSWGPLGWLIPSETFPLETRSAGFAVAVSCNMFFTFVIAQAFLSMLCGMRSGIFFFFSGWIIVMGLFAFFFIPETKGIAIDDMRESVWKPHWFWKRYMLPEDDHHDIEKRNA

SEQ ID NO: 361 - protein, 518 aa, Cucumis sativus
MAGGGFVSQGGGAHHEGNVNTFVIITCLVAAMGGLIFGYDLGISGGVTSMEHFLKQFFPSVYEQQAKAAGGNQYCKFDSQLLTLFTSSLYLAALAASFLASVVTRAFGRKMSMLTGGSVFLVGSILNGAAVNVEMLIIGRLLLGVGVGFANQSVPVYLSEMAPPKIRGALNIGFQMAITIGILVANLVNYGTAQIKNGWGWRLSLALAAVPAIMMTVGAFFLPDTPNSILERGDMEKARKMLKKIRGLDNVDAEFQELVDACESAKKVQHPWKNIMQPRYRPQLVICSVIPFFQQLTGINVITFYAPVLYKTLGFGDSASLMSAVISGAVNVLATIVSIVTVDKFGRKFLFMEGGAQMFISQIAVGSMIWKNFGVNGEGSMSGGIDADILLALICVYVAGFAWSWGPLGWLVPSEICPLEIRSAGQAINVSVNMFWTFVIGQLFLSMLCHMKFGLFYFFAGFVALMTIFIYWFLPETKNVPIEEMNSVWRAHWFWGKFIPEDAVIGHHVSMEPYGKGV

SEQ ID NO: 362 - protein, 282 aa, Methanococcoides vulcani
MIPAEFLVVFFGLMAAISWGAGDFSGGFASKRANVYSVVLITQAVGVFLLAASAHLMAEEMPPLGGMLWGAVAGVFISIGLLALYRGLSQGRMGFVAPISAVVAASVPVIYGAFYEGLPAVHQMVGFVFAFVAVWLIAGGGDETSKIERTDLILPLIAGTGFGLFFISIDRVSDTAVLWPLTAARIAAVITLLIFIALSRQVYIPPKNILPVVIIAGIFDTGGNTFFALASQAGRLDIASITSSLYPAGTVLLAWLILKEKLSSKQWIGVAAALVAIVFISA

SEQ ID NO: 363 - protein, 664 aa, Homo sapiens
MDSSTWSPKTTAVTRPVETHELIRNAADISIIVIYFVVVMAVGLWAMFSTNRGTVGGFFLAGRSMVWWPIGASLFASNIGSGHFVGLAGTGAASGIAIGGFEWNALVLVVVLGWLFVPIYIKAGVVTMPEYLRKRFGGQRIQVYLSLLSLLLYIFTKISADIFSGAIFINLALGLNLYLAIFLLLAITALYTITGGLAAVIYTDTLQTVIMLVGSLILTGFAFHEVGGYDAFMEKYMKAIPTIVSDGNTTFQEKCYTPRADSFHIFRDPLTGDLPWPGFIFGMSILTLWYWCTDQVIVQRCLSAKNMSHVKGGCILCGYLKLMPMFIMVMPGMISRILYTEKIACVVPSECEKYCGTKVGCTNIAYPTLVVELMPNGLRGLMLSVMLASLMSSLTSIFNSASTLFTMDIYAKVRKRASEKELMIAGRLFILVLIGISIAWVPIVQSAQSGQLFDYIQSITSYLGPPIAAVFLLAIFWKRVNEPGAFWGLILGLLIGISRMITEFAYGTGSCMEPSNCPTIICGVHYLYFAIILFAISFITIVVISLLTKPIPDVHLYRLCWSLRNSKEERIDLDAEEENIQEGPKETIEIETQVPEKKKGIFRRAYDLFCGLEQHGAPKMTEEEEKAMKMKMTDTSEKPLWRTVLNVNGIILVTVAVFCHAYFA

SEQ ID NO: 364 - protein, 512 aa, Populus trichocarpa
MAGGAFVAHGSGRKYEGGVTCFVIITCLVAAMGGLIFGYDIGISGGVTSMDSFLKRFFPSVYNKEHETRDDNNMYCKFDSHLLTLFTSSLYLAALVASFFSSTVTRLFGRKISMLFGGLVFLVGAIFNGAATNIAMLIIGRLLLGVGVGFANQSVPIYLSEMAPAQIRGALNIGFQMAITIGILAANLINYGTAQIKEGYGWRISLGLAAVPALMITIGSFFLPDTPNSILERGHPEQAKRMLQKIRGTDNVEVEFQDLVDATEAAKKVEHPWKNILQPKYRPQLVICTMIPFFQQLTGINVIMFYAPVLFKTLGFGDDAALMSAVITGLVNLVCTLVSVYSADRFGRRILFLEGGVQMIISQILVGIMIAINFGTRGVGELSKGSANLVLFFICAYVAAFAWSWGPLGWLVPSEICPLEIRSAGQAINVSVNMFFTFLIGQFFLSMLCHMKFGLFLFFAGFVVLMTICVFFFLPETKNVPIEEMNRVWKAHWFWGKYIPDDAVIGSQTYTA

SEQ ID NO: 365 - protein, 477 aa, Streptococcus thermophilus
MAKQYKNYVNGEWKTSENSITIYAPANGEELGSVPAMSQAEVDEVYAAAKAALPAWRALSYAERAAYLHKAADILERDAEKIGQVLSKEISKGLKSAIGEVVRTAEIIHYAAEEGLRLEGEVLEGGAFDAGSKKKIAVVRREPVGLVLAISPFNYPVNLAGSKIAPALIAGDVVAFKPPTQGSISGLLLVEAFVEAGIPAGVLNSITGRGSVIGDYIVEHKAVDFINFTGSTPVGENIGRLAAMRPVMLELGGKDAAIVLEDADLDLTAKNIVAGAFDYSGQRCTAIKRVLVMDSVADELVEKVTALVGNITVGMPEESASVTPLIDTKAADFVQGLIDDAVEQGATAKTELKREGNLIYPAVFDHVTTDMRLAWEEPFGPVLPFIRVSSVEEAIKISNESEFGLQGAVFTQDYPRAFAIAEQLEVGTVHINNKTQRGTDNFPFLGVKGSGAGTQGVKYSIEAMTRVKSTVFDISDY

SEQ ID NO: 366 - protein, 475 aa, Streptococcus urinalis
MTKQYKNYVNGEWKLSENEIKIYAPASGEELGSVPAMTQAEVDDVYASAKAALPAWRALSYVERANYLHKAADILVRDAEKIGSVLSQEVAKGHKSAVSEVIRTAEIINYAAEEGLRMEGEVLEGGSFEAASKKKIAIVRREPVGLVLAISPFNYPVNLAGSKIAPALIAGNVVALKPPTQGSISGILLAQAFAEAGIPAGVFNTITGRGSVIGDYIVEHEAVNFINFTGSTPVGERIGKLAGMRPIMLELGGKDSAIVLEDADLDVAAKNIVAGAFGYSGQRCTAVKRVLVMDSVADALVEKVSQKVSALTIGNPEDDADITPLIDTKAADFVEGLINDAKEKGAQPLHEIKREGNLVCPLVFDKVTTDMRLAWEEPFGPVLPFIRVKSVEEAIKISNESEYGLQASVFTNNFPRAFAIAEQLEVGTVHINNKTQRGTDNFPFLGAKKSGAGVQGVKYSIEAMTSVKSVVFDIE

SEQ ID NO: 367 - protein, 475 aa, Streptococcus canis
MTTQYKNLVNGEWKLSENEIKIYAPATGEELGSVPAMSREEVDAVYGAARQALAGWRALSYVERAAFLHKAADILVRDAEKIGAILSKEVAKGHKAAVSEVIRTAEIINYAAEEGLRMEGEVLEGGSFEAASKKKIAIVRREPVGLVLAISPFNYPVNLAGSKIAPALIAGNVVALKPPTQGSISGLLLAEAFAEAGIPAGVFNTITGRGSVIGDYIVEHEAVNFINFTGSTPIGERIGKLAGMRPIMLELGGKDSAIVLEDADLDLAAKNIVAGAFGYSGQRCTAVKRVLVMESVADDLVEKIRDKVLQLTIGNPEDNADITPLIDTSAADFVEGLIKDAVDKGATAHTDIKREGNLICPILFDHVTTDMRLAWEEPFGPVLPIIRVASVEEAIKISNESEYGLQASIFTTNFPQAFGIAEQLEVGTVHINNKTQRGTDNFPFLGAKKSGAGVQGVKYSIEAMTSVKSVVFDIQ

SEQ ID NO: 368 - protein, 475 aa, Streptococcus thoraltensis
MSKQYKNLVNGEWKLSDNEIKIYAPATGEELGSVPAMSQEEVDYVYETAKAAQPAWRALSYVERAAYLHKVADILDRDAEKIGEVLSKEIAKGYKAAVSEVTRTADIIRYAAEEGVRMQGEVLEGGSFDAASKKKIAMVRREPLGLVLAISPFNYPVNLAGSKIAPALISGNVVALKPPTQGSISGLVLAEVFAEAGIPAGVFSTITGRGSVIGDYIVEHEAVNFINFTGSTPVGERIGKMAGMRPIMLELGGKDSAIVLEDADLEVAAKNIVDGAFGYSGQRCTAVKRVLVMDSVADELVEMLREKVLKLTVGNPEDNADITPLIDTAAADFVEGLVNDAVEKGADAKTDILREGNLIYPILFDNVTTDMKLAWEEPFGPVLPVIRVSSVEEAIEISNKSEYGLQASVFTNDFPLAFSIAEQLEVGTVHINNKTQRGTDNFPFLGAKKSGAGTQGVKYSIEAMTTVKSVVFDIK

SEQ ID NO: 369 - protein, 475 aa, Streptococcus dysgalactiae
MTTQYKNLVNGDWKLSESDIKIYAPATGEELGSVPAMTQAEVDAVYASAKKALPAWRALSYVERAAYLHKAADILVRDAEKIGAVLSKEVAKGHKAAVSEVIRTAEIINYAAEEGLRMEGEVLEGGSFEAASKKKIAIVRREPVGLVLAISPFNYPVNLAGSKIAPALIAGNVVALKPPTQGSISGLLLAEAFAEAGIPAGVFNTITGRGSVIGDYIVEHEAVNFINFTGSTPIGEGIGKLAGMRPIMLELGGKDSAIVLEDADLALAAKNIVAGAFGYSGQRCTAVKRVLVMDKVADQLAAEIKTLVEKLSVGMPEDDADITPLIDTKAADFVEGLIKDAADKGATALTTFNREGNLISPVLFDHVTTDMRLAWEEPFGPVLPIIRVTSVEEAIEISNASEYGLQASIFTNNFPKAFGIAEQLEVGTVHLNNKTQRGTDNFPFLGAKKSGAGVQGVKYSIEAMTTVKSVVFDIQ

SEQ ID NO: 370 - protein, 475 aa, Streptococcus pyogenes
MAKQYKNLVNGEWKLSENEITIYAPATGEELGSVPAMTQAEVDAVYASAKKALPAWRALSYVERAAYLHKAADILVRDAEKIGAVLSKEVAKGHKAAVSEVIRTAEIINYAAEEGLRMEGEVLEGGSFEAASKKKIAIVRREPVGLVLAISPFNYPVNLAGSKIAPALIAGNVVALKPPTQGSISGLLLAEAFAEAGIPAGVFNTITGRGSVIGDYIVEHEAVNFINFTGSTPIGEGIGKLAGMRPIMLELGGKDSAIVLEDADLALAAKNIVAGAFGYSGQRCTAVKRVLVMDKVADQLAAEIKTLVEKLSVGMPEDDADITPLIDTKAADFVEGLIKDATDKGATALTAFNREGNLISPVLFDHVTTDMRLAWEEPFGPVLPIIRVTTVEEAIKISNESEYGLQASIFTTNFPKAFGIAEQLEVGTVHLNNKTQRGTDNFPFLGAKKSGAGVQGVKYSIEAMTTVKSVVFDIQ

SEQ ID NO: 371 - protein, 475 aa, Streptococcus ictaluri
MTKEYKNLVNGEWKLSDNNITIYEPATGKALGSVPAMSQEEVDYVYASAKQALPKWRALSYVERAAYLHKAADILVRDAEKIGAILSKEVAKGFKAAVSEVVRTAEIINYAAEEGLRMQGEVLEGGSFEAASKKKIAIVRREPVGLVLAISPFNYPVNLAGSKIAPALIAGNVVALKPPTQGSISGLLLAEAFAEAGIPAGVFNTITGRGSVIGDYIVEHEAVNFINFTGSTAIGEGIGKLAGMRPIMLELGGKDSAIVLEDADLVLAAKNIVSGAFGYSGQRCTAVKRILVMDSVADQLASEIKILVEQLSVGIPEEDADITPLIDTKAADFVEGLIDDAKAKGALALTECKRDNNLISPVLFDRVTTDMRLAWEEPFGPVLPLIRVSSVEEAIEISNASEYGLQASIFTNNFPQAFAIAEQLEVGTVHLNNKTQRGTDNFPFLGAKKSGAGVQGVKYSIEAMTNLKSVVFDIK

SEQ ID NO: 372 - protein, 486 aa, Clostridium perfringens
MFSCIKGKERTFRNLINGEWINSSSDKFIDIYSPVGNCLVGKVPAMTTDEVDLAIKSAKEAQKVWRNVPVNKRAEILYKAADILIEKVEDIAEIMMREIGKDKKSAESEILRSADYIKFTADTAKNLSGESIPGDSFPGFKRNKISLVTREPLGVVLAISPFNYPINLAASKIAPALVAGNSVVLKPATQGSLCGLYLAKVFEQAGVPAGVLNTVTGRGSEIGDYIVTHPEIDFINFTGSTEVGTRISRITTMVPLLMELGGKDAAIVLADADLDLAASNIVAGAYSYSGQRCTAVKRILVVNEVADKLVEKVKEKVQNLKIGNPLEEDVDIVPLIDSKAADFVWELIDDAREKGAHLLVGGTREENMIYPTLFDNVTTDMRLAWEEPFGPVLPIIRVKDKDEAIEIANKSEYGLQSSVFTENINEAFYVADRLEVGTVQVNNKTERGPDHFPFLGVKASGIGTQGIRYSIESMSRPKATVINLVR

SEQ ID NO: 373 - protein, 486 aa, Clostridium chromiireducens
MFNCIKCENNNFKNLINGEWVGNKDNKVIEIYSPLDNSLVGTVPAMTQEDIDHVIQVAKDGQREWSKVPMNERAEILYKAADILVENANELVDIMIREIGKDRKSSKSEIHRTADFIRFTADTAKNMAGESIPGDTFPGFKRNKISVVNREPLGVVLAISPFNYPINLSASKIAPAIIVGNSVVLKPATQGSLCGLYLAKVFQEAGVPNGVLNTITGKGSEIGDYAVTHKGVNFINFTGSTEVGVKISKITSMVPLLMELGGKDAAIVLKDADLDLAANNIVAGGYSYSGQRCTAVKRILVLEKVADELVKKVKEKMSNLTVGNPLDKDVDIVPLISTKSADFVEELIKDAIDKGADLVVGGKRDGNLIYPTLFDNVTGDMRIAWEEPFGPVLPIMRVKDKDEAIEIANKSEYGLQGAVFTENIEDAFYVADRLEVGTVQVNNKTERGPDHFPFLGVKASGIGTQGIRYSIESMSRPKATVINLVR

SEQ ID NO: 374 - protein, 486 aa, Clostridium botulinum
MFNHIKDENNTFKNLINGEWVSSRSFVEIKSPLSNSLLGRVPAMTKEEVDIAVQTAKEAQKKWNKITINERAEILYKASDILLENIDELSELMMMEIAKDRKSCRSEVSRTSDFIKFTADTAKNLSGESIPGDSFPGFKNNKVSIVKREPLGVVLAISPFNYPINLSASKIAPGLMAGNSVVLKPATQGSLCGLYLARIFEKAGVPAGVLNTITGKGSEIGDYITTHKGINFINFTGSTEVGARISKMTSMVPLLMELGGKDAAIVLEDADLELTASNIVAGGYSYSGQRCTAVKRILVVDKVADKLLEKIKEKMKKLTVGNPLEKDVDIVPLISSKAADFVIELIEDAKSKGADLIVGGNREGNLIYPTLFDNVTTDMRLAWEEPFGPVLPIIRVKDKDEAIEIANKSEYGLQSAVFTKNINDAFYVADKLEVGTVQINNKTERGPDNFPFMGVKASGIGTQGIKYSIESMSRPKATIINLSIHN

SEQ ID NO: 375 - protein, 479 aa, Bacillus anthracis
MTTSNTYKFYLNGEWRESSSGETIEIPSPYLHEVIGQVQAITRGEVDEAIASAKEAQKSWAEASLQDRAKYLYKWADELVNMQDEIADIIMKEVGKGYKDAKKEVVRTADFIRYTIEEALHMHGESMMGDSFPGGTKSKLAIIQRAPLGVVLAIAPFNYPVNLSAAKLAPALIMGNAVIFKPATQGAISGIKMVEALHKAGLPKGLVNVATGRGSVIGDYLVEHEGINMVSFTGGTNTGKHLAKKAAMIPLVLELGGKDPGIVREDADLQDAANHIVSGAFSYSGQRCTAIKRVLVHENVADELVGLLKEQVAKLSVGSPEQDSTIVPLIDDKSADFVQGLVDDAVEKGATIVIGNNRERNLIYPTLIDHVTEEMKVAWEEPFGPILPIIRVSSDEQAIEIANKSEFGLQASVFTKDINKAFAIANKIETGSVQINGRTERGPDHFPFIGVKGSGMGAQGIRKSLESMTREKVTVLNLV

SEQ ID NO: 376 - protein, 334 aa, Pyrococcus furiosus
MKIKVGINGYGTIGKRVAYAVTKQDDMELIGVTKTKPDFEAYRAKELGIPVYAASEEFLPRFEKAGFEVEGTLNDLLEKVDIIVDATPGGMGEKNKQLYEKAGVKAIFQGGEKAEVAQVSFVAQANYEAALGKDYVRVVSCNTTGLVRTLNAIKDYVDYVYAVMIRRAADPNDIKRGPINAIKPSVTIPSHHGPDVQTVIPINIETSAFVVPTTIMHVHSIMVELKKPLTREDVIDIFENTTRVLLFEKEKGFESTAQLIEFARDLHREWNNLYEIAVWKESINVKGNRLFYIQAVHQESDVIPENIDAIRAMFEIAEKWESIKKTNKSLGILK

SEQ ID NO: 377 - protein, 477 aa, Streptococcus salivarius
MAKQYKNYVNGEWKTSENEITIYAPANGEELGSVPAMSQAEVDEVYAAAKAALPAWRALSYAERAAYLHKAADILERDAEKIGQVLSKEISKGLKSAIGEVVRTAEIIHYAAEEGLRLEGEVLEGGAFDAGSKKKIAVVRREPVGLVLAISPFNYPVNLAGSKIAPALIAGDVVAFKPPTQGSISGLLLVEAFVEAGIPAGVLNSITGRGSVIGDYIVEHKAVDFINFTGSTPVGENIGRLAAMRPIMLELGGKDAAIVLEDADLDLTAKNIVAGAFDYSGQRCTAIKRVLVMDSVADELVEKVTALVGNITVGMPEESASVTPLIDTKAADFVQGLINDAVEQGATAKTELKREGNLIYPAVFDHVTTDMRLAWEEPFGPVLPFIRVSSVEEAIKISNESEFGLQGAVFTQDYPRAFAIAEQLEVGTVHINNKTQRGTDNFPFLGVKGSGAGTQGVKYSIEAMTRVKSTVFDIANY

SEQ ID NO: 378 - protein, 482 aa, Clostridium acetobutylicum
MFENISSNGVYKNLFDGKWVESKTNKTIETHSPYDGSLIGKVQALSKEEVDEIFKSSRTAQKKWGETPINERARIMRKAADILDDNAEYIAKILSNEIAKDLKSSLSEVKRTADFIRFTANEGTHMEGEAINSDNFPGSKKDKLSLVERVPLGIVLAISPFNYPVNLSGSKVAPALIAGNSVVLKPSTTGAISALHLAEIFNAAGLPAGVLNTVTGKGSEIGDYLITHEEVNFINFTGSSAVGKHISKIAGMIPMVLELGGKDAAIVLEDANLETTAKSIVSGAYGYSGQRCTAVKRVLVMDKVADELVELVTKKVKELKVGNPFDDVTITPLIDNKAADYVQTLIDDAIEKGATLIVGNKRKENLMYPTLFDNVTADMRIAWEEPFGPVLPIIRVKSMDEAIELANRSEYGLQSAVFTENMHDAFYIANKLDVGTVQVNNKPERGPDHFPFLGTKSSGMGTQGIRYSIEAMTRHKSIVLNL

SEQ ID NO: 379 - protein, 484 aa, Clostridium pasteurianum
MFENISEGKNYKSLFNGEWVKSKSGKTIQLKSPVDETVIGEIQSLSQEEVNDILENSKAAQIKWGETPINERAEVLFKAAELLEENVEEIAKIMQAEIAKDSKSAVSEVKRTVDFIKFTASEGKHIEGETIGGDNFPGFNKSKLSFVTRVPLGVVLSISPFNYPVNLSASKIAPALIAGNSVVLKPPTQGAISALYLAEVFNKAGLPKGVLNTVTGRGSEIGDYLVTHKNVNFINFTGSTEVGKHIAKEANMIPMLMELGGKDAAIVLEDADLELAAKNIVSGAYSYSGQRCTAVKRVLVIDKVADKLIKLIEERVNQLKVGNPEDGVDITPLIDSKAADFVQSLIDDALAKGAKLILGNKREGNLIYPTLFDNVTTDMRLAWEEPFGPVLPIIRIKDIEEAISIANRSEYGLQSSVFTRNIDDAFYIAKKLEVGTVQINNKTERGPDHFPFLGVKSSGMGTQGIRYSIEAMSRPKAIVLNLPR

SEQ ID NO: 380 - protein, 234 aa, Bacillus licheniformis
LAIPPLNYPVNLFAAKLAPALIMGSAVIFKPATQGAISGIKMVEALHKAGLPKGLVNVATGRGSVIGDYLVEHEGINMVSFTGGTNTGKHLAKKASMIPLVLELGGKDPGIVREDADLQDAANHIVSGAFSYSGQRCTAIKRVLVHENVADELVSLLKAQVAELSVGSPEQDSTIVPLIDDKSADFVQGLVDDAVEKGATIVIGNKRERNLIYPTLIDHVTTDMRLAWEEPFGP

SEQ ID NO: 381 - protein, 477 aa, Rhodococcus opacus
MSNSPALAADKAPGLTIDGQIVTTSAVNRVINPATGKVFAEVPDAGVEHLDAAVDAGRRAAPSWRELGIAVRQEIVRNVVELIRTNIDELAMLVTLEQGKPLAKAAGEIDSGLRGLSRYASTDIPVEIYRDNDDEYIEIHREPVGVVGAITAWNYPLLLALWKIGPALVTGNTIILKPSPLTPVATLRLGELLQQALPAGVLQILSGGDDLGRAMTSHPGINKITFTGSERAGKSIMSGAGPTLKRLTLELGGNDAGIVLDDVDVAAMADDLYWAALSNCGAVCAGLKRLYVPAHLASAIEEALAEVAKTIVVGNGLDEGVDMGPVQNAAQFAKVRGYVDDAAHRGADVYFRGEVPEGPGYFHPVTLVRGVDDTTPLVKEEQFGPVLPILTYTDIDDAVERANNSDLGLGASVWSTNEQRAVQVANRLEAGTAWVNQHPVLTSDVPFGGIKQSGLGVEQSIHGILEYTNFRVLRVKR

SEQ ID NO: 382 - protein, 506 aa, Pyrococcus furiosus
MSKFIHHKIFDEIYEIGEDGVPEFKTYIAGKWIYGEKFKDIKSPINGEVIARVSILSREQIEEAISTTYEIGREKIRDYPGEKRISSFLKAAEMMKEAFDDFVRILILDAGKPKSNAMGEVKATIERLEKTTFEFGRLIGDYIPGDWSEETLESEAIVKREPYGLILAISPFNYPLFISATKVIPALLSGNAVLLKPASADPLAPILFTRVLELSGLPKESFSLLTVPGGFMDDIVRDKRIRAITFTGSTEVGEHIIRTGGIKAYHLELGGKDPAIVLNDANIEESVEKIVKGIVTYSGQRCDAIRLILVEEDIYEQFRESLVAQLSKIEPKNPLEDENAIMGPLIDEDSANYIEEIYKDAIEKGARPLLEFRRRGNYVWPIVLEVNNEILPTLRAFNEDVFGPLALLIKVKDEDEAIEIANSSRFGLDAAVFTTCEKRARKVARKLEVGSVFINEYPRHGIGYYPFGGMKDSGIGREGIGYSLEMLTTTKTIVHNFRGQGVWEYI

SEQ ID NO: 383 - protein, 509 aa, Saccharolobus solfataricus
MEKTSVLIKSKELMEIYELKDGVPYFKTYLSGQWISGDEWQDVISPIDLNIIGKIPKLNWNQIDDTLEHIYRKGRWSIRDTPGEKRLDIYKKMASLLDKFKEDFVNVLMINNGKTKSAAEGEVKAAIERLLRADLDVKETRGDYVPGDWSSETLETEAVVRKEPVGVVLSIVPFNYPLFDTVNKIVYTTVIGNAIIIKPPSSTPLPILMLAKVMELASFPKDSFAIITIPGRDMNKVVGDKRIQAISLTGSTETGEEVVRNAGIKQFIMELGGGDPAIVLSDADLAWAAQRIAAGIISYTGQRCDSVKLVLVEEEVYDTLKDLLIKELTKSVKVGDPRDPLTTVGPVIDVKTVDEWEKAIKDAVEKGGKILFGGKRLGPTYIEPVLIEAPKETLKDMYFYNKEVFASAALLIKVKNIDEALEISNSRKYGLDAAIFGKDINKIRKLQRFLEVGAIYINDYPRHGIGYFPFGGRKDSGIGREGIGYTIQYVTAYKSIVYNYKGKGIWEYL

SEQ ID NO: 384 - protein, 506 aa, Sulfolobus tokodaii
MVTLKELTGFKDIYTIDSDGIPVFKTYLVGEWVGSKEIENIKSPIDLTVYARVPKLNYEMVDNTLSILYSKGRWAIRDLPGEKRLKIYHTLADLIEKYREDFVEVLMIGNGKTKSAAQGEVNAAIERLIRADLDVRKLYGEYVPGDWSSESLEAEAIIRREPLGVVLAITPFNYPLFDIVNKLVYSTVAGNAFMLKPASSTPLPAIMLAKLLEIAGFPKEALAIIAVPGSEMDKIVADKRISVISLTGSSETGEHVMKVAGLKQYVMELGGGDPAIVLDDSDPKTTAQKIVTGITSYSGQRCDSIKFIFAEPKVYEELKNYIVEELKKVKVGDPREADTVMGPIIDTRTVDEFEYAVKDAVEKGGNILYGGKRLGPTYIEPTLIEIDKEKIKDLYLYKKEVFLSIAVITKVNNIDEAIELSNGRRYGLDAAIFGNDITKIRKLIRMLEVGAVYVNEYPKHGIGYFPFGGRKDSGIGREGIGYTIENVTAYKTIVYNYRGKGVWEYL

SEQ ID NO: 385 - protein, 507 aa, Thermococcus kodakarensis
MVEPFVPEGEIFEGIFRQNEGIPEFATYVNGEWVFTGKTAEVRSPIDGSLIARVSLSDMALSNRAVAAAYSAGRHEIRDTPGEKRLEAFLKVAELIRDSFDDFVTALVLDAGKPLSNARGEVTATIERLEKTTMEFGRLIGDYIPGDWSAESLGSEGIVKREPYGVVLAISPYNYPLFISTAKIVPALLAGNAVLLKPSSQDPLAPLLLSRVLQLAGIPESAYHLLTVPGALMDSILADRRIRAVTFTGSTEVGEHILSMGGIKFYHMELGGKDPAVVLDDAPLEETVEKLVKGMVSYSGQRCDAIRLIIAEEGIYEQLKRELVAALSKIEPENPLEDEDAIMGPLINERSAEKIEEVYRDALEKGAVPLTGFKRKGAYVWPVLLEASREVLPGLRAFQEDVFGPLTILVKVSNEDEAVELANSSRFGLDAAVFSGDDSRARKVARRLEVGAVFINEFPRHGIGYYPFGGMKDSGIGREGIGYSIETLTTTKTIVRNYRGRGVWDYI

SEQ ID NO: 386 - protein, 501 aa, Thermoproteus tenax
MRAGLLEGVIKEKGGVPVYPSYLAGEWGGSGQEIEVKSPIDLATIAKVISPSREEVERTLDVLFKRGRWSARDMPGTERLAVLRKAADIIERNLDVFAEVLVMNAGKPKSAAVGEVKAAVDRLRLAELDLKKIGGDYIPGDWTYDTLETEGLVRREPLGVVAAITPFNYPLFDAVNKITYSFIYGNAVVVKPSISDPLPAAMAVKALLDAGFPPDAIALLNLPGKEAEKIVADDRVAAVSFTGSTEVGERVVKVGGVKQYVMELGGGDPAIVLEDADLDLAADKIARGIYSYAGQRCDAIKLVLAERPVYGKLVEEVAKRLSSLRVGDPRDPTVDVGPLISPSAVDEMMAAIEDAVEKGGRVLAGGRRLGPTYVQPTLVEAPADRVKDMVLYKREVFAPVALAVEVKDLDQAIELANGRPYGLDAAVFGRDVVKIRRAVRLLEVGAIYINDMPRHGIGYYPFGGRKKSGVFREGIGYAVEAVTAYKTIVFNYKGKGVWKYE

SEQ ID NO: 387 - protein, 498 aa, Chlamydomonas reinhardtii; identical to SEQ ID NO: 263

SEQ ID NO: 388 - protein, 503 aa, Hevea brasiliensis
MAGTGVFAEILDGDVYKYYSDGEWKKSSSGKTVAIINPTTRKTQYKVQACSQAEVNKVMESAKIGQKAWARTPLWKRAELLHKAAAILKEHKAPIAECLVKEIAKPAKDAVSEVVRSGDLVSYTAEEGVRILGEGKFLVSDSFPGNERTKYCLTSKIPLGVILAIPPFNYPVNLAVSKIGPALIAGNSLVLKPPTQGAVSCLHMVHCFHLAGFPKGLISCVTGKGSEIGDFLTMHPGVNCISFTGGDTGIAISKKAGMIPLQMELGGKDACIVLEDADLDLVAANIIKGGFSYSGQRCTAIKVVLVMESVADALVEKVNARVAKLRVGPPEDDCDITPVVTESSANFIEGLVTDAKEKGATFCQEYKRDGNLIWPLLLDNVRPDMRIAWEEPFGPILPVIRINSAEEGIHHCNASNFGLQGCVFTKDINKAVLISDAMETGTVQINSAPARGPDHFPFQGLKDSGIGSQGITNSINMMTKVKSTVINLPSPSYSMGFSFTSKI

SEQ ID NO: 389 - protein, 496 aa, Apium graveolens; identical to SEQ ID NO: 264

SEQ ID NO: 390 - protein, 496 aa, Arabidopsis thaliana
MAGTGLFAEILDGEVYKYYADGEWKTSSSGKSVAIMNPATRKTQYKAQACTQEEVYAVMELAKSAQKSWAKTPLWKRAELLHKAAAILKDNKAPMAESLVKEIAKPAKDSVTEVVRSGDLISYCAEEGVRILGEGKFLLSDSFPGNDRTKYCLTSKIPLGVVLAIPPFNYPVNLAVSKIAPALIAGNSLVLKPPTQGAVSCLHMVHCFHLAGFPKGLISCITGKGSEIGDFLTMHPAVNCISFTGGDTGISISKKAGMIPLQMELGGKDACIVLDDADLDLVASNIIKGGFSYSGQRCTAVKVVLVMESVADELVEKVKAKVAKLTVGPPEENSDITAVVSESSANFIEGLVMDAKEKGATFCQEYKREGNLIWPLLLDNVRPDMRIAWEEPFGPVVPVLRINSVEEGINHCNASNFGLQGCVFTKDINKAILISDAMETGTVQINSAPARGPDHFPFQGLKDSGIGSQGVTNSINLMTKVKTTVINLPTPSYSMG

SEQ ID NO: 391 - protein, 496 aa, Triticum aesivum; identical to SEQ ID NO: 262

SEQ ID NO: 392 - DNA, 25 bp, Artificial Sequence
  Artificial DNA Primer
aacgacagcacaaaggaactttcac

SEQ ID NO: 393 - DNA, 37 bp, Artificial Sequence
  Artificial DNA Primer
tttaaaacaccaagaacttagtttcgaataaacacac

SEQ ID NO: 394 - DNA, 34 bp, Artificial Sequence
  Artificial DNA Primer
aaaaagctcgaaatgaatggatatattctttttg

SEQ ID NO: 395 - DNA, 40 bp, Artificial Sequence
  Artificial DNA Primer
gaaaaaaaaaaaaaggaaaaaacgcgtaaatgaaaagttc
